United States Patent Application Publication US 2022/0211063 A1 - sequence listing, part 7

SEQ ID NO: 8 - DNA, 7752879 bp, Penicillium roqueforti (residues 1,938,221-3,876,440 of 7,752,879)
  misc_feature (471)..(2988): n is a, c, g, or t
  misc_feature (125072)..(125245): n is a, c, g, or t
  misc_feature (177030)..(177805): n is a, c, g, or t
  misc_feature (384129)..(384319): n is a, c, g, or t
  misc_feature (555860)..(555885): n is a, c, g, or t
  misc_feature (601274)..(601374): n is a, c, g, or t
  misc_feature (676765)..(677109): n is a, c, g, or t
  misc_feature (719635)..(719834): n is a, c, g, or t
  misc_feature (1142860)..(1143077): n is a, c, g, or t
  misc_feature (1186408)..(1187030): n is a, c, g, or t
  misc_feature (1335891)..(1336062): n is a, c, g, or t
  misc_feature (1623998)..(1624186): n is a, c, g, or t
  misc_feature (1638152)..(1638319): n is a, c, g, or t
  misc_feature (1653332)..(1653453): n is a, c, g, or t
  misc_feature (1825656)..(1825836): n is a, c, g, or t
  misc_feature (2226455)..(2226603): n is a, c, g, or t
  misc_feature (2393442)..(2393608): n is a, c, g, or t
  misc_feature (2448145)..(2448283): n is a, c, g, or t
  misc_feature (2535420)..(2535533): n is a, c, g, or t
  misc_feature (2537093)..(2537315): n is a, c, g, or t
  misc_feature (2854224)..(2854262): n is a, c, g, or t
  misc_feature (2984634)..(2984883): n is a, c, g, or t
  misc_feature (3020936)..(3021095): n is a, c, g, or t
  misc_feature (3033772)..(3034149): n is a, c, g, or t
  misc_feature (3159378)..(3159499): n is a, c, g, or t
  misc_feature (3215603)..(3215868): n is a, c, g, or t
  misc_feature (3224663)..(3224965): n is a, c, g, or t
  misc_feature (3317546)..(3317826): n is a, c, g, or t
  misc_feature (3542230)..(3542405): n is a, c, g, or t
  misc_feature (3623237)..(3671736): n is a, c, g, or t
  misc_feature (3674276)..(3676312): n is a, c, g, or t
  misc_feature (3691086)..(3691320): n is a, c, g, or t
  misc_feature (3731831)..(3732089): n is a, c, g, or t
  misc_feature (3989186)..(3989361): n is a, c, g, or t
  misc_feature (3992145)..(3992256): n is a, c, g, or t
  misc_feature (4101501)..(4101938): n is a, c, g, or t
  misc_feature (4339075)..(4339204): n is a, c, g, or t
  misc_feature (4339582)..(4339886): n is a, c, g, or t
  misc_feature (4384249)..(4384411): n is a, c, g, or t
  misc_feature (4533861)..(4534087): n is a, c, g, or t
  misc_feature (4697184)..(4697354): n is a, c, g, or t
  misc_feature (4793975)..(4796690): n is a, c, g, or t
  misc_feature (4802292)..(4802664): n is a, c, g, or t
  misc_feature (5082703)..(5082846): n is a, c, g, or t
  misc_feature (5096885)..(5097041): n is a, c, g, or t
  misc_feature (5239633)..(5239771): n is a, c, g, or t
  misc_feature (5277986)..(5278170): n is a, c, g, or t
  misc_feature (5381360)..(5381559): n is a, c, g, or t
  misc_feature (5479545)..(5479976): n is a, c, g, or t
  misc_feature (5512536)..(5512732): n is a, c, g, or t
  misc_feature (5631457)..(5631544): n is a, c, g, or t
  misc_feature (5721942)..(5722166): n is a, c, g, or t
  misc_feature (5729059)..(5729204): n is a, c, g, or t
  misc_feature (5774252)..(5774341): n is a, c, g, or t
  misc_feature (5808718)..(5808762): n is a, c, g, or t
  misc_feature (5833194)..(5833311): n is a, c, g, or t
  misc_feature (5846751)..(5846942): n is a, c, g, or t
  misc_feature (5859879)..(5864600): n is a, c, g, or t
  misc_feature (5865581)..(5948580): n is a, c, g, or t
  misc_feature (5949161)..(5949595): n is a, c, g, or t
  misc_feature (6008652)..(6008740): n is a, c, g, or t
  misc_feature (6324675)..(6325396): n is a, c, g, or t
  misc_feature (6373521)..(6373881): n is a, c, g, or t
  misc_feature (6805860)..(6805862): n is a, c, g, or t
  misc_feature (6847293)..(6848308): n is a, c, g, or t
  misc_feature (6999877)..(7000009): n is a, c, g, or t
  misc_feature (7043639)..(7047446): n is a, c, g, or t
  misc_feature (7057193)..(7057698): n is a, c, g, or t
  misc_feature (7108603)..(7109374): n is a, c, g, or t
  misc_feature (7114511)..(7115199): n is a, c, g, or t
  misc_feature (7152289)..(7152484): n is a, c, g, or t
  misc_feature (7347604)..(7347710): n is a, c, g, or t
  misc_feature (7355867)..(7355871): n is a, c, g, or t
  misc_feature (7379349)..(7379623): n is a, c, g, or t
  misc_feature (7441770)..(7441995): n is a, c, g, or t
  misc_feature (7525120)..(7525239): n is a, c, g, or t
  misc_feature (7750736)..(7752649): n is a, c, g, or t
gacagggagagtgtgtcgacgagtcaagcataaacacgtctttcgcgcctcatggaaaccagcctacctcgtcctccgaccgaacctcctttccgtatacaaggacgaagaaaccacccgcctccgagtctccattcccctgtctgaagtgaccgctgtcgcgcccgtcaagtctccccgatcgacccggcggcatgttttcggtgtctttaccccatctacgaattaccgcttcgaagccctgagcgaacgcgatgcagaggactggatcgaccgcattcgtgccgagaccccccgcgacgaggacgagcgagctttcctggctttgaccaaaaagcacgatccccctgccatccagaaacagctcgtcgacgagacaaccgatcactccgacttcgatcacactggccgcgccagctctccggagccacgccatccgctgtccccacgcagtaaaaatgcccagaaactcccttacatccaggattactccggcaacgagatggcatcgcattcagagttctctgatggacctgcgccatcacgtaacatctacctacgatccatgccctccatccattcactgtccgtttcagcactggaggataaatcggcaccccggccgtcatcgtctctaccccgagataccagcaaacaaacagactcgggcactttgcgtgacccagagcgggtaatctgtcaggggtacctgcaggggctgcgcatacaaggaaccgtgcgtcagtggaaacggctctgggttgtgcttcgacctaagagtttggccttttacaaggatgaatcggagtatgctgcagtcaagatcatccccatgtctcatgtatttgatgccgcagaagtggaccctttgtcgagatcgaagacgttctgtttgcagatcatcgccgaagaaaagacctatcgactttgcgccccggatgaagagtccctggcgcgctggctgggctcattgaaaagcattctggccgcgcgcaggcgattggagccgtctatggccacttctgtataatgccactcgctctacggagtagggcttgttttattactctacctattcctactcccttccttcacctcatcttccctgcatctcaggaaccctctctcattatttcttatcttttaactcttttctttcaatatacccaggttggtgatctcgttttgactgctcgtctcgcggtgagctccggagtcttcgaataacggattggcgttagtaccttcgtgctcattgagcaccctgtttttttctaccttcatttctccaactgtctattgatttcattcattgacacgatgtattctcattgcatccatgcttctctctcactgtggcatcctcccttttccgtcgtccgtcttcttccatttcagtgtctatattgagtacctattatgtatcatattgcttcaggctgtactacgctagtgcataatatataatactctatcaggataccatcattcaagtttggtgttaaccgttcggtgtaatttttcgaatgtcacagatatggcgctaatgtatgacttatattacagagggtcaaaccaagcttttggtcggccttggctgagacccctcaattttagatgtgagaaatcaaattcgtgactctttttggagttgactagactcggcaaatcatccgtctacaattgggttacaaatttcgatttcgtggagaggtggactgaaatgcaggcagaagtagagccaatgagaatgctgaatgacgctacacataatctatatcttgggaataccaacctggagaataaactaaatgctatgtgagcaatacaagaaatgtgtagcaatgaatacaagaaccctcccatgaccaaactaacgcatttcctcttcttcaacgggaatactgttatactcacccgagaaggtcctgcctgcatcagtggtgaggtcgtcctcaggcttactctcgtgttgcacaaccaagaatgacaagaacacaatagcggctccaacccagtacagagggctggagtattgtgactgtaggaccatctgtccaatcagggagagcgggatggtcatactaagcccgactgtcacgataagcggggtggtgaggagcatggagtaagcccaagcaatgtcggagacaaatgatgcaaacgcgttggtctgatagacgtgaggttagaatcaaaggtgagcaacaggagtcggagccataccagaatgattgaccacactcgcgacgtctcgggtaaggagaagggctcaagtcccgtccagtgcatgatgaagaaaccaggccacagaaagatgatgttgaaaaatccaaccaggccgaagaagagtggcatgtttacccgggattcgtcgccaacttgtttcttcatcacgacggtataaagaccgtacaagatggcactgaacgctgccatggcatcgccaagggcaatctcccctgaggatttgtgtgggaatgaaccctcgccactatctgcgccctcgcctgtttctggcttggagagatctacgcgcgaaatcaggataatgccaatcagagaagccaagacacccattaatttgcgcatcgtgaatttctcaacacgcagcagggcgccgaagaccatagtccatacacctagaagagtgagggtgagaacctggtctttacacatctaaacgggggaatcttaccactggtggaagtcagaatggttgtgcttgcaactgacgtgaattgaagacatcccatggcgaagtaatttgcctatccaagaaatctcgattagttcccttccaacacataagcttccatatcgtgaggtgtatgacatacagtaaactatgataggttagccagctgatcatctatctaagcctcaaggtcattgtgcttacccagagcagacaaaactgaatactgagtttagctgtcgctttaagccctagctttccgcttgaaggatcctgtctcccccgcgagaattgcccgtcctcttcatctgagccgctgcgtagtatcctctcctcctcggccttcgggtcatgcgaatccaaatggttcaaaaagctcctcaacgatgtgatctgagaaagtttcccgtgacgccagagagcccatgttcgacgagcgacgatgagaatgagaggcatcataaacatggaggtattcgtgtaagttacgaagaaagggttcgggtatgttttgtcggcgaagatagtctggatgtcatttcatgggtaattagccaaatgtttgtatcaatgtatgtattttgcgttacgaggttatgatttctcaggaagggatgcgcatacacttccaaggaaattcgaggttgtccacagcacaaccaccactaggagcaggatgattcctaatgttcgccgcgccatccccagtggcatcgtgccaggtgcttcgtgtgtggtcaaggccatggttgtttaagttgttttagttgcctgtgagagggttgaatctgcgcgactcgtcgaggcgtaatactggtgaagaacctcgtgccgccgatgtcgcaatcgctacgtttgcagccgaggatgccgagttggacgggatatcagtcggaccgctgtcatctgaacatctgaagcgtaatgagcaaagatctctgtgcagaagcaaatgagtgtcacgagacttcctgcctaaatatatgcgctgaagagaacacggggttatgccaagcattcgcaagataagggtccgggtggggagaaatgtagtcgccgatattatttcggtactccgtacggagtacatttatttgtagtaattaaccacgagctacatcagcctacatgtgataaataccctgatggctatcataagaagtaacctgccctggtgactacggatcatctgatggtactagatttacttcgagggagtatgcgatcaactgcctattacggaaaaatgaaggaatcgcattaagcctaacaaagacattgtctgcataaaactgacccgagaaagggttgagtaagaagtttctctctgaggtgaatttcacaatgaaaccaagacatctacaagacaccgggggaatggcaaggtgatccaaaacaaaccccgtggtcttctttacagactcaggaccggagaccaaccaaatagtagtaggaaaaaaggaaagacagaggaaataggtcgctggaacatcatagcaattggaagggtatatcaacaggcacagccatcacggtcattgtccagatggatgttgattgggtcgctgaattcaccgctgaattcctcagcctcttcctgggcaagtgcactccgcgcgataactaaatagtgattagaaatgtcgggaaagaacagtttttgagaaaagtagctagggaatttgactcaccttcaaacgcctgctcgacgttgacagcttccttggcactggtctcgaagtagggaatgttacccttcgactggcagaaagtcatggcccgttttgaggagatcatacgcttgttctcctctacatcgatcttgttaccgataacaacctgctcatgactattagcacggaccaacatatcattttgcctgctgctgcggcgcatgagataaggaaaagaaatgcaggaacaccacttacgaatgggaaactctctgggtccctcgggcttgcctggatcaagaactcatctcgccagctgtcgagagcctcgaaactcttggagttgttcacatcataaaccaagacacagcagtcggctccacgatagaaggcgactcccaacgactggaaccgttcttggcccgcagtatcccaaatctgacacctcaaagttagttactgcccctcatcacgagattgtgctaaagtctctagcgccttacctgcattgtcacgagtcggtcgtcaacgagaacctcctttgtgaggaaatctgctccgattgtggccttgtagcttccactgaacttcttattgacctattcagctcataaaattgcatgttagcggttataggtcttcggggccgaccgcggtacggccataggctagtttgggacgagattgaacggacatattggttcatcaaacttgtttttcccacaccactgtcaccaaggataataacctagatttcaaagacgccagttagcaaaaaaaacccccacatattgaaagattcagtgcccgtcacacggatcagatgcggggattgtaccttgaggaggaccttcttccttgacgccatggttggggattggccaagtgaccaagtgtaaatgtgcgaggaataaccgtaagttcactattaagcaaagacctataagcagtcttcactaagcctttatagaacagataaggacaagttagttggagagttggggtcgggttgcagccggattcgatgatgcatgaggagagctgggcggtggagcgggcggtgggcaagtgataacgattagcacatctgactccccaagcggcaaccaactccacttcatcactttcaggtacatttgcttggaaggcttatggcccactggagggaggattacttggctgccctgacagtgcgagaccaacgagagaaagcaaatgctactctctatgatgcctgtcagtctatcattgatgctttttgttgagtgattgcgactgacatcatttaccaaatctagatgcccagcttgcagatcgcaccagcaaattagcagcagcagcaaaacttaccagtcctgcaatagcgcagagtgaagctcaacccactgtcccatctcctatagttgcaccatccaaaaggcaacgatcgactgagccagactataccccgactgatcttctcaatactacccgtgcagacctttccgaggcacagcgatcccgctcggaattacaagatcgcttgaatcgggtgaacacagaagcagaaacacttcgcaagaagagttcacaagaggctcgacgaataaacgccttggaaagcgagagggcgcatctcaagctacgattggcagacagagatgcggagctaaaagggaaagccaagctgctagaggtaggctgtttgatattcacataggctttctaatcacgcaagggtgagtgagggaaagtggctgacatacttgtgcgcatctctgcaggatttccaagatgaactggcgacgctaaaccttcagcttaatatggcagaagaacgatcaactcgacttaaaaatgaaaacaaagacctagttgatcgttggatggccagaatgggtcaagaagccgaggctatgaacgatgcatcgaagtattcctgactagtcctaatgcaccgagcaggtgacagggctaggttgctagaatagaacggagtctagctcctgcggcatttatatattgaatcatgatagccactgcaaaagcgctagatatatatggtcgtgcggctacattaagcttgctcatctttccactgaatgcctgaacagcaggtgctgcacaaagcccgcgcgtggtccatgacttactttcctataatcagtcgaaaatagctagctccctaaccacatcgcccctgtacaactccttgagagcctcgaaaagtcctgataatcccaccaagttgcatacgataagccgcatagctagtgcctatgtcccgcgataatctaatactgtcctcttagattgcctgtcaattaccaacattccattcaatattcatacaccatagcactaaatattgaggaatgagaaggctaaaccaagtatcttactaccagggcctgaacttgaaaggattattcgttttgtacagtcaggttgtcagaaaatggtatcatacaaaaataaacagggaaagtatatccaataacggacaaagtaatgtacaaaagtgccaaaaactaaatgtatgtgccatgcaaaaataccaaactagccattgaagactatggcgtatcatcaatgaaagctttcagccgagagctgtctttagtggcaatgaaatatgtaccaccaacgtcagtccagctcacgttgttcgaccagtaattcttctgctggaccttgaggagattaatcggagagttcaggttgcgagactggattttgtgaccagcgggaacgaaagacttaagtgagacaattttgcagccttctttcatatccaaaaaatggttgatcagctcattgttcagttgtggggtgaaggcctggttgttgataagcaccacgtcagcccgcttcaagacgcttatgatactctcctgctcaagaaagtcacctcggacaagatgagtttttcctggcgcaattccccacagccggcatcgagccttgaactcggattgctgtaaatctgccaaatcacatgcgtttgacatcatctcgcaaccccaactctcacagccaacttcgagtgccgcctgaagaacgacattacctacgcccgagccaagatcaacaaagacttggcccgattttagcttggtttctttgaaaattgtgctgataaagcgggggagaagctctccgtagacgttgtccgtgccgttctcgtattgccggagtgactcgacttgaggggataccgtgcgcgagtaaatttgagtgagaattctttccacccaaggtaaaccaatgccttgtttcgcatccaaatgcttcgcaagactgccgttggtccttaaccgctggatagccttattgtaatcatcgacagcttcccggaattgagtctcggatgttacagccagggcccggcgtaatcggcgcctgatccccgtcgtctcgtcgttgaactgaccagcctcctcgctcgggatgtaattatcgcagaccgtttcgatgacctgaacaatgtcgtcgatgggtcggaatccgtcactttctcgggggactacagagtcatatctggccgaacaataaattagcatatcagtgtccagagatcgatagtctaaccaaacgtacctctcctgctgcgaagcactggggtattgcaggagaatctctttgcgcttgccctcggcgccaaaggcgggcttgaacttgccggacttctgacccgacgttatatccgcggcatgtatcattttaaacgggcgagatccttcttctgagaacgccttcgccgagcggagacgccgctccgggtcgggttcggcgctggcgctagtcctcgcgcgtttgtgcacctcaaacgaggcctcgctgtcgctggcgtcatcgtcgctcgagagtcgttgttcgggtgtcggcctttttcgagtgcgcgagggagtacttaatcgttttgccgagcgtgcttccaggtcactagagaccgatcgagatttcaacgcccgcgccttccggttccgctccgccgaggactggattcgaggtgatcgagtatccgagggttgggtgactgatcgtgtaggagctgcaggtcgagtctgcacaaccttgcgaatttgcgccttctttggctgtagtgagaaggccccggcccctcctttctgaaggtggtcgaaaaagcccatatggatagggatagatagatataaacaaactaatgcagaatggaaatgatgtatgcaaagaatgcaataaaaacgagtcaaacgatataagtataatgcgagcaagaaggaagcgggagaagaaaagaaaagaagcagggcttatcgattaaggcgccactcggggaaaccacgcgatcccgcgttccttggcacttacttggcgcttttgtctatagcctcatttcttctacaggcgtctaaatggatctacatatatgttgttcaaatgttccaaggttaccatctggctatcaaaagtcagattatatatgtaaattatccgattcaaacatttgaactatgaactatggccactctctctatttcttcgactttttcttcgccagcctcttctccgcacgaacatccttcttcatacgagcatcgacaatcttgtacttgcccttgacacccttaggacggccagagataccacgattgggacctttggccactacgagcttgacttcctgcttaggcttcttcttggttgccctgctcatcaatctcgcgattgcgccagctttgtcccgctcgctgagagcatcgtcctctgccaaaagcgctgacttcttgcgcagtttctccagtctttgagccgccttgtacttcttgcgtccctgggcctccatcaccttcttgatcgggcgggcattgatggcacgcatcttttctctaatagcatccgcggcagccttggtgatgggacggacaggcctgctgtgcttgccctcgtcgtcgaggaaccattcgggaaggccgtccacgtcgcggaaagcaaatcggttgaagccatcgtcaacaatatcagtcgaccttttttctccagtagccattgcttgcgcaagggccatggcttctgcggtaatgatgtcgatgtctgtaggttgaggaataaatgttagtcctgacgttattcatgtccagcatcaaacttacccagctggccattcgctttgagtggatcttttccttctgtctgttcagcctcgctctcatcggactcgtcgacccagtcagagttcttctttccgttcttcttgttcttttgtttggaggtaggaatataatcctcttcttcctcgtcttcatccatcgcaaagatgttgtcgctttcatcatcttcctcttcctctgcctctttttcttcttcttcttcctcttcctcctcgccctcttctagaccttcgaagatatcttgatcgaagaacatggaggcattgtttgaaagtttcttagcagcaagtgcttgacttgtagtggcagtttcatcatccgaatcctcctcctcctcatcactgctgcctttctctctgtcagaaaagccctcccactcgtccacttcgtattgcttgcgtgtctttttagcacgcaatttcgaatccttgtcctccaggcggccggtgtactgctcgtacatctggtcgagctccctttcaagacggtcctcctcgtcgtcgctctcttcggtttcggactcggattcgttttcattttcactgccgctctcggtaggaagatcacgagcattgacaactgcatctctggcattctcccggtcgacgcgtcgcaaagtgaatgtggtgtcgtcacctcccataccaagctgctccataccaatttccatgggagtggtcatgttcatctgcattcgaatgatatccttgcgcttcttttcattctccttgcgcctttccttcttgcccttggtagtctgctgctctcgcatgcggatcaagtcttcctggatctgtagttcttcgtccataggggccacctcggccacttcttcttcctcgccttcttgggttggcttctttttgatcacaagtccgaacttctctcgacacttgatacgccatctgagcaagttgcggaactcctttttgcctagtaccttcagatcctcacagcaagttcggatctcctctgttgtttcctccaaacgatccagtgtggacaacgcaagatctccacctggcggttgctggaagctaagtttgttgtagccacccaagatagagatagggtcagtagtgttgatgaaatccgtcacggggatctccttgtgttgggtgtaatctccttcttcataaccttcacgcttgcgcttcttcttttctgggttgaaaaccttcgcttcgtagttgggggtgggagcggtaagttcagcaaagacgtgcttcgggtcgaggaacttcgggtcaatgcgctttggggccttgaatccgcggcaaacgacgaaaatttcggcagagacatttcgagacgaaggaggcttggttgcctcgacggaattgaacagctgcttgaagacccacagcagggggttgtaatctttggaccggaagaccttagtaacgaaggttccgccctcgcccaagaaatcagtagccagtctcagggactccaaaaccaattctgcctgggagaaagcatcttgaacccaagcggcaccaacgttgggcgcaccatcgtgaaggacgacatctgctttccagtgtttgatgtgtgatcgaatcgttgcgcgacacttgtccgttgtgatatcgctctggaaagtaatggctcgaggaattggcttgataggggagagatcgacaccaatgataagactttgcgcaggcatgtactctgcagcgacttgacaccatgactgctcggccgttagaaaaaaaaaaaactttggggataaaggtgccattcgaggatacttacaccaggcgcagcgcaaagatcgatacaaactctgcttttctctaagaatccatacttctgattcaattggatcaacttgaatgcggcacgggctctgtaacccttttctttggcaagtcgataccacttatccaaacgaccttttccatgctgcaaatagtcagcacatgaagtgatgcaagctgaggtacggtataacatacctttttctggatcgccattttgaaggaaagctgatctcaatagaccagagaatcctttcgaaaatgaccggagatgtagaacgaatgtatactttttttctatggcagaggatccgagaaaaaaaaagttgcattacttatcgctcaccgcctttgaaccggctctccagattgctgcctgaggccaaagttgcaccaaacatgtgacatgatatcactcaggcacccccggtcacttgtggcgcttggtagaagctttgtcacttgggtttgatcgtctaactatagacctgatgtttttaccctacctccatgacgcccaagggatctcgcaagagagtgaagaccagcccctccggcgtggactcaccggctgaactgagcggtgatggccgagaccgctcagactcccagtcacgggggtacaatgccgtaagctctttgtggctagaatagccagtcctttttgtcatatttactgatcatctatcgtttatatagagctggtatcccggctcctggtcttccattgcgaaagtgtccaaagcagcgccagttaccgaggttgcccgtgaaagcatctcagcagccaaatctgtagcatcgaacgtcacgaactcatcggcttctctccttgatacatcaacaaagaatcgatattcttctattcaacttacgcgaaaagcgggcgcctcgactaggtctctccccgctgacgccaccaccacccgagtcaacattgcgtcggatggttcggcttccactacggctgtcgacgatcccgaaagctccagggccctagaaccggcaaaatccgataaagaaacacccaacgaaagtgatatcaagccgttagaggaaccggccaaggagcagaaggccactcccaacgccgatcccagcacattgcatgcgggatctgcagagggccccgaacaatctagtcgttggctctcatggatatatggaccatcaactacatctaaaggccctacgaatgttccggattcaacgccagccgtggaaaatccgttggccgagaatcaaatggcagagcagagtactcaacctatagtgaaagactatacagcacgggaagaggaacaactggatccggaaccagagcagaccaaagatactgttgaagttaccctcacatcccagaagcgatcgtggcttcagatgtggtatggtacaaatacaccgagccagcaaaataacccaccatctacagaatccacgataaccccatccgcgaattccgattccaccgatacccctgacacaaaaatggcgccgcaagatcccccagatgagccagcagaacgagctggcggatcacagaccccggtcggaaccacgagatcatctggctggtcattctggtccaaagattcaaacaaagatgggtcttccaataaaccgcaggaagccgaagctatcgaggcgtcaatgggaccgaactcgccatcaaaccatacggcgcttgagccagatacagattcaaatatcaagataacccagaaaagcagtatcaaagtcaagcccacgaaagacaaacgtcttaaggttggacccaccactgaaagcactcctacatctacgccacctgttgaacctcgaccagccgatgttaccgcctcaaaacaattacagcaaattcttcccaaccaagtactaccgaagttcgaagaaacctatgcgtttgagcaatcgccctccattttgcagagcctcgggcgattcctgaattatgggaaaggaacagaggttcggcacgtcagtagggtcaaagatccgcttcatgtgagacacgccttggctattggcgttcatggatatttccccgcccctttcattcgaagtgtactcggacagcccacagggacatccatccggttctccaatatggcagcagacgccatccggaagtacaccgagagccatggctactcttgcgagattgcaaagattgcattggaaggagaaggccgcattacggagcgagtggatctcctatggaagctccttctgaattggatggaggaaatccggaaggctgatttcgttatgttcgcatgtcacagtcaaggtgtgccagtaacaattatgctagttgcaaagttgatacagttcggctgtcttgacgccaaacgagtcggcatctgcgctatggcaggtgtgaaccttggccccttcccggattatcgttctcgatggatcagtgggtctgctggagagctgtttgagtttgcactaccttatagcaaggtctcgaaagagtacgaagctgctctcaaatgtgccctcaattttggtgttcgcatctcttacataggaagtatcgatgaccaacttgtttcactggaggtaagtacataactcgatattcaaacatctatcaaatttctgactagcctccagtcctccctcttctcacctatagcccacccttacgtctaccgcgctgtcttcgttgatggccgagtccacaccccaagcttgtgagcaacttaacttcctcatccacctaatctcgatcgacgatcctaataacaaaacacagcctctctcatctagttggcttcgtcctcaagcttcgcaaccttggtatctcagaccacggtctaatccgagaattaagcaccccactagcaggaagtctatactcaggagagggacattctcggctgtacgacgaggaagccgtttactcgtatgtaacagtcataaatccctacccacaaacaaaactgacattatcttccagcatggccatagaattcgcactcgagacttcttccgtctcagactccgcgctcagcgtcaagcgagccagcagctccgtcacgccaaacccgtacattctccccttcgccatgcgtggtctgctcgaagaggagtatgtgcgtcgagagctgcataatgagacaatggaattgctcaagcaatttgacgactggaaaccttctagtaaggttctgaaggatgtaaagtttagactagaaggtatccggtccaagctctagctaagcttgttagtcgataattagaagtttcttgcttggatggaaatttgatattagcggtttattagatatggaaatacattttcgcttttcttaagtacttgctgccggtctgtatgtaagtacaataataacttccatgtatagcaacagtatatacattcctttctcggttttggtcgatttgtgatggaagttgtctttcatatttgtattatagcggagatgtcaaaaaatgtcgcgattttgttgagcacagaacgagaatgaatagtggagactccagtcgtaagaagaggggaggggatcattataaaaatgcaaatacaggcatgaaagtgccagggaaataaaaaaagaagctcagaacgaccgaagacaaaaccgccctggttaaacagatgcgagtgggaacgccgttttatatgcaccttcgatttcatctagaacaatgttagcgtgagaaccgcataccagaaaaagatacaacaccaacctctcatcccatccaatgcctcgaaagcaagcgaataattcgacaccgccccgatgatccgctctaagccctgccggagttcctcaatgagctggccagtcgaatctccgccttgctcattctcggcggtgtcgggcgcaagctgcttcgccacgcgcgccttatagtagatcatgaacatagcatagctactttgcataagacagcatgcgaaggagggcattgtccggggtaacgaacgaccctgctgctgctgggggtctgagagaggctgcgggacgggcaggttgtggaacatgcgggagatgacgagtgcggcctgtagacagatcttcgcggattgctgcgtgctgtaggggaacccagccgcgaatggatattgcgagtactgaggtgcgtatgagctgatttcggggttgatgtctgatgaggtggaggaatcggatggggtcatgtattccgttgaggttgctcgttcgagagaggttaggtttgaacaggagcaggtgatgttgttgatgccggcgggtttggtgctgacaattgtggtggcgctgtttggatttgctgccgtcaggtcacaatgtctttttatgaaaagggggatgtctgagaaggctcggaagcgatgcgttttgatttgggcactgtagtcattgttagatgggtttagatatgacaaggtgaatagctcgaacctggatagcttgatccgggatattgcgcgtatgctttgggctgtaatggattcgttgtgatcgccgaaatccgaggtctggggcagaagcgggagtagctccgcttgtgcaatcacagactgggtccaggcatcaagttgctgcattctttcgaacatataatacatccctgattgtgacgcgatgcacttgttcagatcaccaatgaactgggttgccgatacaagcacttgttgagcttgtataaagatagcccaaccctgaagaccggttagcggatgaaaaataatgcggagatcttcgagtgcaaacctcggtatctgatgaaaacgatgggtatggagtcgtgaactgcgggtcattgatgacaatagcaggcatctgtttctttattagctgcagttcatgcctgaaaagctaagttactcaccgttgtgctaacaatagatccttgaaccacacaataatactggacaacaattagatcaggaaccaaccaatgaaagaggagagatacaaacagtcatccaccaggctctccgtcgagcttccgaagattcatcgttctccagttgagcatggagtgacttgtccaaggcaattgcaagagcctgaccagcgcgatatcgcatcttgagtaagttaccgcgctgggagtattcataaactgaaagcaccaagagagccaggagactttcataatccaccggagtttgcgaatgaaatctttcccgcccaacaaacggtcgtgcggcagacaatgcctgtccgggatcagtcgaggacagatcaagatcgcactccgcttcgattgttgaatgggcaagttgggcgaaagtatgcgcgtatgttctgcgctggattacagatgctgcggacgacggctcaatatcacttgggtgcggaatcaaagccaagattgcagatattgcaagacttagaggtgaacggggccggtacatcatcatcggttcggatgtattcgagcacggaacagagcagttcaacggtcgatctcggcacggtggcgatgcccgtggcggtagaatggggaaataattatgaatgaagtcataataggcattcaatctggggatattagacaatatctggaacttattgcagagagatacttacatttcgagctcacttccataggtccttacaaaggtttgagcgttgttcgaaggtgatgatatcaggggcacttgcatgtgcgactgactaccatcgccagtaaagaagctctggaacatggagggaatttcggattgaaaatcgagatgcctcaaacctgcgccaggcagagagagttcatcgatttggctgaacatccccggtgctagactttagtgagtatattgcttctttttcggacatgagggcgacgtcataccttcttcaaactccgggggtgaggggacagaattataaagagcatcatcttgcctcgattcttgttctggcgatagggaggacttttccttctttttgcgtggtccgcctcgtttgctgggcaagtaagagcattctctatctttgctaacacactagagtgaatgtcagtccagtccagtccatgcaatgaaaataaacattgatcaacccagatccacaaaaataaaagcgcccaaagcattcaaatcacaaagagtacatacgttcgtgcatggcatctggccgccacatcgtgtcctggaagcccggctgaaataacattagtggagatgttcctctttttttcttcacgggatttgctcaccaaggcagacatgctaccttaactggcggtttggcgaacttcttgcgaactgatcgaggtgctgtcgaggccagtccgttataatcctgaaaagtagcggccatgacgacacctaacataagtacgtcaatctacagaaccatttgaaactgcacctctcggatatcttggcaaccgaatactagttgaaatggggcatttagcttaataaaatcggaagtccgagagggcgttgatatagagacttccgtgtgattgcttgatctaggcaaatcccgagccgtggggaggttcgggatttgctttttggtaactaagcagagaggtcgagtccaaccccaaataggagggtggtgccagaatgcggtgtatatgtagggtaatcgaatgtggatatgtttcttatttcagattcatttttcttttctttctcggtcgaattcaggggatcaaaagagaaagcgaaaacgaaaggcaattttgatattcgaagtatttcggattgaacgttccgatacgaaagatactagcattaactgaccaaactgcaacatgtgactgtaattttaccaaaaacattcgatcacgtggatccacagtggcacgccgatgatgtagggagtaagcgacttaggtaagattatctattattgagaatgatcacttgcaaatacttcaagattaaatttatggagtagttcctgtcgatttcttccaaacaggacgttcggataattcggggactatgcaacggtgtggatcctgaaggtatcgctaagccactcacaatgcgcgcgctactacatacatgatttggaatagttttcatgcgaggcatcgtcgatcgatgctaatcgactattcacggggatgcgcataatccgatccgtaattagacttaagtatgggccttgccttttccaagggggaccttaaggcccacaacatgccgcacactatcccagacactgtcctggaccttcacagggatcttgtgtccctttaagaattggtcgatcaaccacattccaaccacgaattcttcacgcagcaagagtccgttattttggtgatcgaccagatcccatacttgccccaagattgcctctgacaggcggctgcgggaccagatctcccggacgaccagattgagaaccatctccgaggcatgaggtggccatgactcgcttccatcggaatcgggagggatgagaagccctttattagacgcccaaacaccttcgtaccgcttgcgttccctctcggtgacctcggttcgccagcgcttacggtccccctccctgtgtttgtgagggtgtttgtgtagggggtttctatgcttgcgatggtcggcatcagtgggtttcggcatgccgcggagtgtcatcggcatgctcttcggtggacttggtgtcctggacagatcagtcttgtgatgatggtgtgtcaaatgtagaatggctcgtgcccctcgtcgatggggaggaagcggcgggggaggattgggagatggggatgctcgtgatgatgccagggatgaggcgataattgcattggagagggattcctcggtcattccaagagagtcatctattagactggagctactcgtcgtacgtgaatggtttgacatggacgcctcgctcggtgtcgaaggtcgcaggggtgttgtgatgaatccatgatttctgatagaccctcgtggtggaggcacacggggcggaagcctcggttttgactcatcagacggcatagaaggattcagagactctagagaaggatggggactcggtcctcgactatcctgatcatccagagttgacctggattgttgggatggagagcgcttgtagataggcagatctgagtcggactttaagccactttcgtgcagcatgcgacctaagtagatatctctgtcatgtatcgagcgaagagaggctggtaatggtggcacccggctcgcacttcgtgctgcacttgcgcctgctccaagtctggcggttgtcgacggaacactggtgtctcgcccaggggaccttgacgcagcgagtcgtgccgcaatttgggaggtcgaggtcgaggatagagaggctgctgaagctcgtcccctcaaacttgacaatgtactgactggaggcgaaggtggcttggcccatctcccgattttatcctttacggagcccacttcgggggcgtcggatccagctctctggcgacccagagtatgacggtcacttgccattgcggcagtggcaacagaggatctagggttcacattaggtgagtgatccatagagtgttggaatgcaagcatggcgccttgtaatgcgtcattccgggccacgcccaaccgctggttcgcggaagcggcctcgccatccatggaatcgattccccacagaatccgacaagtaagcgagttatgttgaagggaattatatcaagatcaagataatcaatgatcaggagggtcctgcgatttgtttctgagacgtttaaggggaaatatcgacgggaaatgcacgtgcacgcgaccgtacacgtttcttctacgcgactatatatgttgcatgtataaaatcacatatcacgattaaatccttttcagatactgtatctagatgatttctctattttatcacattcctaacatcactattattactccgtatactctagtgactccgcactgtaaccccagattctaattagccgagccgcaattcattcatccgttctccgctttgcatccttcccctccatctgcaatgtgacttacatgtcagcctggcttggggaaatgttatcttcttctctcaagcccagtcggagccatgtcgggtaaagacaaccccgatgattcccctgttgaaacatatggaaggtccgaagtccgccaagatacagatcagaatgcagacgaattggtcgccggccacacccgatgctcagtttgtagcagtaccttccgacgaccggagcatctgaaacgacatctgcggagtcatacaaaggagaaaccatttgagtgtgtccagtgcggccggcacttttcaaggacgtatgcgcttgggctatagttatccttatgtcgaatcatacactaatcaatccctagtgacaccctccatcgacatgaactgagtcaccatgcaccagggacgggagggaaagaccgcacccaccggattactgtcaaaacattccgagcatgctttagttgcgcaacggccagagtaagatgtagcggcgggacgccatgtggacggtgcgacgctcgctcgctcggatgtcaataccccacacaaaggcggtccaaagccaaagacatgagagattcagggcaaggagccgatgcgcaaaatgacaatctcaaacccatgcatcaagacttgaattcagcttctagtcagagccaattttctacacaccggcaaaaggagctggcatcatccaaaacttcgctcaatgtaacatctacacccggcagtgatcacaaaagacaaatatcacaagatgcgcacaccattgcaaatgccccgaatcctcgtttccttctcccaaatgagatacgacggccgtctgaaatactgccactgggagcttaccagacgtatgacaactcgagctccaatatcctcaaagcattccctgttaattcatccaacaatctaagctctgaaataagtgataaccagccgggtatggacccagcaggtaataattctgaggtaccgctagagtttgatcccacgttctttgaccagtctacgctttccactatcaattggctccctagggagttgcttcctagtgattctaatggctacgcacagtctaccggtgtttcctcgcgatacaaccaatctctcagcccaagcgcctacttatctcggacagagtggcaaccgccaattatcagcgctgagcagctcaatattttgcaaccagagcgagattctcagacaccctctgtccatgtttctctaaggaacaacatggaaaccttgaatcaatattcccacggtattagcgagccttctccgcatacagaatctgtgaattctgctagggggtcagcagactactatgttgatggtgcaccatccagacgccctaagtacgcgccttggtccagcgaatctgtagagccggttgatattggcaggcatttgttggtcgaagatggcgagcacaggttcaacttccctataatttccgaactgcgaacagatcaaatatcggaagatataacccggtgcacacgacggattgaaatctccacctacgatgagatttatcggtactttgttcaactgtgttgcaacgaaactcctttttttgaagtgttcgaatcggagaggtttcccaccgcggatgaatgcaaccagttcatcatcttcttctttgatacatttcaggctgtttatccgatattacatctttctaaatttgaccctaatacaagtcattggctcttgaccttgtcagtaatagcgctcggctgccaggtgtcccacatttccgagatggagcagtgtacaactgctctccgcgagctgattcggcggggtatataccttgaggtgagaaaggtccccttatccccattcaatgctttccagctaattgttctacaccaccagaaagaaaagagtccccctagtcagtcttctcttgagatattacaggctatgttgttcaattgcattggacttcttcatagtaagagcgagagagaaaaggcctcggcattgagcacctttggtgacttggtgatactcatgagaacttcccggttattgacaccgatgcggattaaatttaatgaggcatcccaggatgcagcttgggcttcttggattcaagatgaagtcagaagacgcaccggctattgtatatgggtgagctttgtcgaagaatggagcctttacttttactaacgatgatagcttgtggattgtactcttgcatattactttgatgatagacctctcctctccctagacgacggacaagctgcattgcctgcacatgagaagctatggcaagcatcctccgcagcgacatggaaaccactgtgggcgcagtcatgtggtaactcttattcagaccccaaaaccgaccaatcgctaacttctacagtcaatgaatccttatacgacgcagtccatatcctctatatcgagaagagagtagtgccaggtataggagaattcagtcatattctactcatccacgctctctaccagcgaatgtgggaagtgggagactacttccgccgcccactatccttctggagcccgacagcgaagaagcaatcttgcgagaccgccattcccagcggttcggtatggctcccaggaattccctcatactcgaaatggcgcaatagcgcatgtgactgcctcgacatccttcattggaccgccaacagcaccgcagccaaagctggaggcctcgagcacccaaccatcctccacctccacgttgcccggctattcctactctctccgttccgcgaaatgcgctccctcgcaacctccctggtaacagaaaagcagcactggcgcaaacgacaccagtccctcgagtggcaatacatctggcgctggatgaaacacgaccaatataaagcccggctatcaattatccacgccggcctcacgctctggcatattcgtcgctactcgatgaacgctttccacgagcctgtcgcggctttcatcgccgtgctgacgctgtgggcatacggatcctgtcacccgcatacatcccatgagtccagtccgcgtgcagaactgctccacgaatcgggttttattcagcttgaccggccttgcgatgatgagcttgtgcagattttcgtgcgtgagggtcataaaatgacagtaaacgtcactggtgttggtgatatatgtggaactgagggtccggaaaaggctctacgggttgggtgtgagattctttcgggcttaacggcgtggagtgtttcgaagaagttcatggctatcttgacacggcttgcggatttgagctcttatcattcttcttgggaataacatcgccagcatcagcatgatgctgagcatatctgatttggagcgggatgaacgatgaatttaccaaatatataaacaccttcaatacactagcttttgtattggtcttttggtatgttttatatataaattggagatcggggtgccatgggctagttatatattcctttcttccgatgatggttagcaaaaatagtgacgttaccgccggacaccaatcagttacgcgattcgtaacgggcatcatgaagttgaacgaatcttgaatggtaggataaatgtaggtataaatttggcgaaggcaattgagaactgtgatgatcatcagagtgataacttctttttccgtatagttcgagtggggccatttttatcttatcggcagtgcagcctaaaaacatctggggtagtgcgaccttccgactttcaacttccaacctccgtctcttaatttgcctaaatatggattccgacgagatcctagagcaggatctccacaagccagagaaagaagaagatttggacgaaaagtgagcccataactaactaacggttctgggtagatcactgatagctgttggcagataccccaatagacctcacaaccgggccccgacattgccgttccacgatctgtacctcagtctattcaatccactgagtgaactcaagaagaaaccttcggggcctcctcaagctcgccggaaagttggtccccatggtaaaggtgctacgagtctcaacccgttcgagcgccggcgcgatgtgattgagcgcttcatttcgcggtggcgcaaagaggttggcgacgatatctatcccgcatttcgattgattcttcccgacaaagaccgcgatcgacctatgtacgggatcaaggagaaggctatcgggaagatgctcgtcaaaatcatgaagatcaacaaagaatcagaagatggatacaatcttatgaattggaagcttcccggtcagggcgctacaacgcgtatggcgggtgactttgctggaagatgctttgacgttctctcgaagcggcctatgcggaccgagccgggcgacatgacgatcgacgaggtcaatgagaagctggataagctatctgctgccacaaaggaggatgaacaactgcccatattggccgagttctaccggcggatgaacccagaagagcttctgtggctcatccgcattatacttcggcagatgaaggtcggtgccaccgagcgaacactctttgatgtttggcatcccgatgccgagagtctgtacagcatctctagcagcctacgacgtgtgtgctgggagctgcatgatcccaatatccggcttgagggagaggagcgcggtgtcgcgttgatgcaatgcttccagccgcaactggcccaattccagatgcattcatttgagaagattattgctcgtatgaaaccaaccgaagatgacaaggtgttttggattgaggagaaaatggatggtgagcgtatacaactccatatggcgcctgacgattcaatcaaaggcggtcggagatttggcttctggtcacgcaaggcgaaagaatatacctacctatatggaaatggcatttatgacgagaatggtgctctcacaaggcatctaaaagatgcttttgtggatggagtacagagcattattctcgatggcgaaatgatcacctgggaccctgaacaggacgccatagttccttttggcaccctcaaaagtgcggcgctggcggaacaacgcaatcctttctcaaatggtccgcggcccttgttccgtgtcttcgatatcttatatctcaatggacgcgatctaacaaagtatacccttcgtgatcgtcgcaatgcgctagagaaagttatccgacctgtccatcgccgttttgaaattcacccatacgaggaagctactagcactgcagaggttgaagcggctctgcggaaggtcgtcgctgaggcatcagaaggtcttgtgttgaagaacccgcgctctccatatcggctgaacgaacgccacgatgactggatgaaagtcaaaccagactatatgaccgaatttggagagtccctagacgttgttgtgattggtggatactatggctcgggtcgtcgaggaggtgcgctgtctagttttctctgtggactacgagtcgacgacagcacacaagcagcagagaaattctggtccttttgtaaggtgggtggcgggtttactgcagccgactatcaggaggtgcgtcatcatacggatggcaaatggaaggcgtgggatgcgaagaagccaccgaccacctttatcgaactggcgggtggagatgcccagcatgagcgtccagatatgtggatcagaccatccgactcaattgttttgtgtgtgaaagctgcatctgtcgcaattagtgaccaattccgcatgggattgacgttgcgctttcctcgcttcaagaaattgcgcaaggacaaggattggaaaacctcactctcggttcaggagttccttgacctgaagtcaaatgcggagcaggaacaccgggagaaagagttctctgttgatcactctcgaaagaaacgagtgaagagagccactaaaaaaccactcacggttgctgggaacgatgataatgacgaggtccagtatcttgggccttctggacatatcttcgatgagcttaacttctgtatgtgtgctcccttcctatcgtacattatactaatataatggccttctagtcataatgaccgagtcgagcgtcccagaaaagaaaacaaaacttcaactggaacaactcgtgaaggctaatggtggcaagatttatcaaaccaagacagccggggtagacactctctgtgttgctgagcgaagtgagcttcattctatatataaaacaagtctaagctaatgtttcagcaggaacggtcaaagtagcttccttacaaaagagtggagagcaagacatcattcgaccatcttggcttatcgactgcgtcaagcaaaatgaaatagatgcaggcctgccggatctccttctcccattcgagccaaggtacgttttgacagccaaaggaggtacacatacaaggggctgataattagcgatttttatagacacatgtttttcatgacggaggataaagaggaagaagtcacagcaaatgtcgacaaattcatggacagctatgctcgcgatacaaccgtcgacgagctcaaggatgtatgacacccctagaaaaaatagcgagcaacaatcatgtctttggctgacaaatgttcaatcttacaggtattcaagcaaatggaacaaaaccaagagcagcccgatcatgccccagacccagcaagcgttcggagaatcgaagctctcatccaggaaaaagtaaacgccggctacacggttccatgtggatggctctttcgaggcttgaagtttcatttctactcgagcgaggatgagcaagacgaatcagcctccggagaactgagaaaggagcaccaacgcctccagttcgctcacaacacagcccgtttcgcaggcgctgagaactccagcttgttaaagagctcaggtaccacacacgtgatagtcgacccggggactttgtcttcagcggacatatcttctctccggaagtctctggccgaaaagccgggcgcgaaaatgccgcatcttgttagtgtggactgggtggaagaatgctggaaaaatggcaccttgctggacgaggagagtaagttgtaaccctcttcttcatatttatggctttttgggagcgttctaataattgctggcaggattcttggttcggcgatgaatcgtgagagctgagttcgaatcgcatgataaatcatgcatctctttcattttctgatttgctcttttggcccttgagtgtaatatatttttgttcccgttcttttgtagccaggcggcagaccagcagaatatacgtaacggtgaccaccatgcggactgtcgatttatgagctgcttccttgagtgccgacggattcttgcctagccctgtattcattcaacctgtcaagaacactggccccattccataattcttcatctccatcaatcctctttggcattcctacttgctctaatgcaaatgaagctgcaacagacccataacaagccgcctgttctatatcacctcccgtttggaggtacccaatagaatagcctcctagaaacgcgtttccagctccagtcggatcaaccactttagcagcctgctcttctccagtccctgctatgtgaaatgaaggtagccatttggataggttacccgatcgaacaaagcagccattttcaccagctcggataatcacagtaccctttccttccgggccgacaccactggctaggaatttcaaagccagcgtttcaatctcagttctatcaggagtagccggggtatccacaaacaatgcagctagctctaagtggtttggactaaacacgtcgactagggctacaaccgctagacagtcttgaaggttctccggcttgcatgaaaggggagccggttcccagataatcagaggacgatgttgtatacccgcctgctttcgaagagcgagtatgtttagaatgcgcgttctcatatcttggggagtagcaagatagtgatagattttcgaagttagcaaggctgtgcccggcaacttgctttcttgaattgtaagaaccggggtggtgtacttgaaattcttcgctagaagatgactcgaagttagctcatgttaatatgttatgtttgctgatttagtacgcatgaatatagaatttagaattatcggcaagtgaatataaacgggaatagcaagggcgacggaagaagggtaaagggaagggcttttcgcacgtccgaatgtggtatcttgatactccagtaagcctcgagtcgagggctggtctgattcttttgttatcaccaaaattgtatcccagctatgcaagagttctgcaatagggtccggaaagtcatttccaatatggatcggccaagccaaggagcggctcaatggagaaggcaggaacaaccgagcacctagagtcgctaggaaaaagatacaacgatcaggaatccggttgtttcaatcgagacattacaggcaaaaccaaccgtaagctccggacccacccagcacattgattaaaggtttccggttggcgaagcgaatttcgtcaagcaccaccaagccaaagcttacgaaggaaatatccttggtatccatggggaagatgagcccccaaacctctcaagacaaaattgagttgaagtctttctggggttgagtcatatatttccacttgaatgatctgtacataaacattgaagtgagtcaaataggtgtagttagagggaagccagtccgtaagctcacatgatacaacacgtgagccacgactaaggtaaacaaggaaacgttggaggcgaacgtgatctcaatgctctaaatctgtactagcttggaaatagaagacaatgaccctgttcccacttatcagaggagatcatggggttttcggaaccaatgattgttatcaggctacgtggatgatgtcatgtcgaatgcaagatgagatcacacagtgtgttacaagttgatctaagacatctattaggtacacaatgtctacgtaagtatagccactcaaattccctcgccagtattctagaattattcttaggagcagcattttgatgtaaaggacgaacaagaaccaacacaagcaaggacggagactctcccatagtatgttgtgtgctttacaactaccaggcaagaagctcaatttgtttcaagatttgatttgagttgaatagatatcttaggtagtgatcgaaatatcgatccgagaaaaagaaagaaaaagcagccatagaaaacgcatagcgctgtcaaggtagaaatgggggtatgtaacaaaagaaagaaaatatctgcgccgagcaggacaccgtcctagtccaacgccgcgcttgaggataaccgaaaataagaggaaaagaaaacaaaagatttatgtactgaagtgaagtgtgcccaaaaagggagaagtgtcgtgccataccttgcgctctgcgctaatacagtctgcccaaccctttgtttcaatgggctgagacgcccacccatcgggtcggaacggcgttgttgtcatctccgtcttcgtactgtcccgacaaatgggaattggtcttgcgcgctggcagccagatgcgagcacgggcggggatgtcatcgcggagtttgccgctgcggcgcatgttcatttcgagaaccaccacgcgcaagaaatcgctgttctcacgaatttcgcgctgacgcgacatgggtggattttctgggtcgaaagcgacaaatttctgatccttgctcgcgatgtggaaatggctccgccggttcccgcggccgccggctcggcgatatgtctgcatttggatcgagacggggcacgttttggaggtctgtagcttgtcgaggggatgatcatgatagacatacatctcggccggtgacatcggagtcggattcatcggagatggattcaggtagcggcgtagtgctggagaaggggtttcttgcatcggcaaagggcggcgatcatcggtcatctctggggtgatggtaaaaagagaccgggtaaggaaatcctctgtttggacggaaggggtggcaaatgtcgagaccgactgcgcagcggatttgatggcccgtagagatgctgtgaggtttgacttgaaactagatcccaggcgcccaaatgacgcagatcgccttgcgggtacagcgtcgggtgtggcaggcccattgtcgtttttgatttcgatgtattcgagttcatcgatatcaatttcgtttctaaggagaggatggtctaagtcacactcctcgcaattcgaataccgaggctgtcgtctctcaggtggacttctatggttggaaggggtgggcggcgagagaagactggatggcgatgctaggccatggtctaatgagggtatcgaatcgcttgaggttgatctcactgacggtggtgattcatgttccgaatcgtggcaaggcaggagtttatccggtgggctgagcaggatgtcaagaggggagtaggcggccccatccaggaaactctcttctttcgactcaatatcttcctgcagcatgcgactgaagtcttctacatgatttccacgagggagtttccgaggtctgcgggcggtccagtttcgtcgcggaacagggatagccgttgcatccaacattaaagtaaatgacgtagggatggggcgatcactggacgagctggaagaggaccgatgagaggattccgatgttttcgataaggcccgggaacgaatctctcgacgtggaggcagagtccgcgagccacgctttggaggaattaccactgggatggtgttgatcgatctgcgggattcggtgttcggggtagagagaaggctagaataatccggcggcgtggatgggttcattccatgagactgaaagggtttctgcggcggtgccgagctgaataggaatgctctcgggaccatcatattgactgtttttcatcacacgaccacggttgctatagagcctcggctttaaccagatgaagcgctctggtcgagtttctgcgcgagatacatggatgaaggggagaagcgcaggaagtgagaagcccccagggagtcagacaagagaggaccagcagccaatccgaaggtgtgtgtgttggcccaaagacatgcaagggaagcggatagggccgtgagacaagggtatgcaggcacacacacgcgagccgataaggtaatagagacgagcgatcgagatgggagagtcgggaggatgaatatgagacaggagggtatgaaatgagcagaaggaggagaatggaaagaagtagagaagagatgaggtttaagatagagagagagataatgggaggaagtgtgggcggtccacgggtggtgatctcagatagataagccgtattgggcaggtaaccgcatgtaaagatcacgggaggtgcaggacgtaatttattttaccgtgtgattgattggtttgtgcggggaacaatgccggcagccggcttgcgtccgattgtaacggtatttcactcgattttcaatacaattcttattactcatggaacattccgccggtggagtccggaaggaaatgactttttatagttagtcatctcgatattttcattttatgccgtatattcgatattatgacatgtacaacatagtatctgcctaaatatggactctacaacgcatgattagcccaatggagtcagacatgcatatatagtatataagatgtatatagatgtatgaaaacgaatcacatccatcaacccttcagatcgttgaatagagatgtgggccctttaaggttgcttttagtgcgatgcgggcagatgcacacggttctctccaggttcaaggactaaaagagaagatgtattctacttaggtacattgactaatgtttgcttcttttctattaactagttaactagttaattaggaaagcaacttggaatgataaatacacatatgtaattggggtcacttgggtagatcggcaggagctccgagactcactccgtatctcccatatttaaggggaaaaacactaaaatggagcgggtggctgcagtccgaaaacgtaaactcgaagagatccgacgtggctagtggagcgccataagcgaaaacaattgcggtgaacccccttttttcttcctatattggtggcttataaatgtggctgttattgtaatttgattcatcgcacttccaattgtgtatcattgcttccggagcaatccgtacggagtcctccgtacacattgttacatatgcaaataagccttgaaaagcaaaagaaaaggggactacctaggtacactgttacctacattcgtatttgacctgttcgaaggattcttatagatgggaaatacacacacgtcaaaatgtcgataatgcgcacaatgcccaaaaacggaaaattcgagacgtggctagtggagcgcggttagggtaattgcggtgaacccttatataacatacgatgtaactatgttgtacaatatatagagtggtttttcccgtcttttggtgagattaggcagtcatgcatagtattataacatgattggctttatctattattcagtctgttttgctggcaattgtatgtaacctcgtctactccgtttttgtctgtaaccaacccaccaagggttgaatccttcagggaaaacccggaacaggtatccggaacatgtatcggggataatatcataagactcacctggcaagtgaagcaattttccctttccttaacaattatttcgatataatcatatggaatgagcctataatagacaaaactacctacaatcgtatgtacgtgtctccatgttgtaactagagccgccacgtgaatacattagtcagccacttatcgaaatggacatcccacactgcacagccatccagaggccggcgataaccacaccctgcgtcgtcgctcccaaggtgcttgcatccaatcatttcaagagcatcatcaatttctaatctcgccaaaattctgcactgggcttgtccccgtctccactgcgggtcattgcaatcgtggggtacatgattcattctacaagtgccaggcctgtgtaaatcttcaagcgtagctggtgcgtccatattttcttgttgtaaggcgcaatgtccgatctgagcgcctggctaaacagattgaatcgccatggatggtccgatagactaacatgccgacatagccaccgtgtgcaccctcgatgttctactaatgagctttgtactctaaaacatggacatcccatgtcgaggtttggaccagtcaccggcaaacacgacactaggcatgcgaacaggccccgcggagaaaccaccatactcagttcttgaatcgcacctatcaaactatctgagatcatgagtaccgaacgtgcccaaccgtctaaaagacgatgcgtcagcacagcctgtgtcgcgtgtcgcaaaaggaagtcaaaggttgggctttcgaattctgatgtcgaggtgtcacattactaatatctgcacgtagtgtgatggaaacctgcccagctgtgcagcttgctcctcggtatatcatacaccttgtatgtatctcgtttacagagagcaatacgagcattgctgactatgtattcataggtgtatatgatcccaactcggatcaccgccgcaaaggtgtctacaagaaggacaccgatacattgcgcacccgaaacaccaccttacagacattgatacaggcaatattaaactacgacgaagcggatgctttcgaattagtacgtcagattcgctcctgcgatgatctcgaagatgtagcggcttcggtgatcgcccaggagaaagggctcatgtctgcggaccaaacagcaaaggagtcagccagcaatgagaatgcggctgagatagatcaattcgagtccgagctggctggcaagatgagtgagctcatgctcgacggttctcgaaaatttattggaggtacctcgaacctcatcttcttgccgccaggctccgagttgcacgagtctgcttcgatccaaaacaatttcgtcctcgatggtaataatcaaacacacgctgtgagccgctggacagaagttacagacgactcctccctaatcagtcatcttatgaccatgtacttcgcatggcattatccgtttttcaccatcctagctaagaatatgttctatcgggattacatccgcggtgtctctagttcatattgctctgcattactcgtcaacgctatgctagccctgggctgccatttcagctcatggcaaggtgcttttgatgatccccagaatcttgcaacagcggggaatcatttcttcaaagaggccaagcgacttgtattggaaaatgacgaacatgagaatgcgaagctttgcacggtccaggcattcgcccttctgtctgtccgagaggcaggatgtggccgtgaaggaaaaggctgggtctatagtggtcttagtttccgcatggcttttgacctagggttaaatctcgattcggcaaatcttggggcgcacagtctcaccgacgaagagattgatgctcggcggatcaccttttggggttgctatctcattgacaagtcagtctccattcccttgcttatctccaatgcatctctaacactctacagatgctggtcaaattacctcggtcgtcaaccccagttaacctcgactaactctaatgtacccaaggctgatgtgttgccacaagaggaaatagagttatggtcgccatacactgatgctggagttggtcacgagcacacgcaaccgtcacgaaccagggctgtcgcgctgcagatatccaaactgtgtgagatcagcagcgatgtacttgtgctcttctaccatccaaccgaactcgaaaatcctcagtccaaacagtcggaactgaagaaactgagtggtgttcacacccggcttgaggcgtggaaaaataacctgcccagggaactggtggcaaaagacggacagctaccacaagtgctcgtcatgcagtaagttgacacctacgcacaaggcgttgcctcagctaactcttggctcagtatgctgtatcagcttcagataatccatttatatcggccattcctaaagtataccaaggctaatactccacttccttcccatgtctcacctcgcaagatatgcacccaggccgccgcgactgtttctaagctgctgcgtatgtacaaacgaggatatggactgaaacagatctgcaacatcgccgtctatattgcccacactgcatgcaccatccatcttctcaatctcccagacaaaaatgcccagagagacgtgatacacggcctcaagaacctcgaagaaatggcagtgggttggctctgcgctcgacgtaccctccgcatcctcgacatatccgcaaataaatggcaagtagagctaccacccgaagcaatctctatcttcgaacgaacacatcacaaatggggctcctggggctcctgggaccaagcgacttccccctcaacatccgacgactatcccatcccaaccatgccacacccctctacaagcccgagtcgattctcaccgtctgggctgccattcccacattctcacaccgagcccatcgccatggccgagacaccaatgggccctcaatacggacccctcgccaccgttccgatatcgttcccctccatgcaagggatgaatccacctcaagcccgacggcccgagtttgcccttcccgaaccaacatatctccggccccaagtcgcctaccaattcaaccccctcccgggatccgttccgactccctcttctcctcatccggacaactggtacgatggctctggggctcatatatcaccccaaaacgcaacgccgacatcggttgcatcgcccgtgtctgggtatgacggcacggaaaacctggtcgaggagagccatgactggtggtcgagaaatgccaacgcgtataacatcggcatggatggttggagtggtacttggaatactgctcctcaaaaccagccttctgtcattcactaccaggatggtaatctcatgtctgttgctcagccttctagttctggcgatgagcagttacaggccccggtgaggatgtcgacagtcgggtcgcccgatgacacgactgggtatgggagtaggtgggaataatgcgtggatttggtgatttttgacttatgggaacatatatcgtgcgctttttgataccacttgaggggcttcttatattttcccggcgtttatggacatgccatctacaaatttgtttctgttccgaaatcttacgatcaatttacagacaaaaacattcattgtcaaaagatttgtcatagatgatcattagttctcaaaaaccagaaccaaggtgcaaaaggctacttcccgaatgctgcttgaaagagaaagatataaaagaaaaaaaaaggtgcatgggatggtatcactaggcattgttgttagtacaatgatatcagtcaagacaacagaaaagaaaagaagagcttaccaagaaataatcagcgacaggcttcttcgcgggcatgccccgcgtatcctgcgctgcagcctcaaagacacggtatctccttcctgggctgacgactctattatctgcaacaatgccgttgctccgaccatattcaccgttactgcgagcgacagtgccaccgccgctggtgtcttcacccagctcaaggatagcggcaacattgccgcagcggtagcagtagttcggtgcagaccagacagtgacgatgccaccatcaaacatctctttatatccctccatcacaagctggtgtgcacgcgcgacaagagacaagccgttgagatggttgaactgtttgacgatatcgccgccgaagaggaacccagctccgcgcgggctcaacccccagccttcgatctcatccgggtctgaccagagcagatcgcacatagcaccttcatgtggcacctcttgcttgcggtcaatcagtcggattttatcgacagagtcaatgagcggtgataatccaccgtgtacacagagcaccgcaccagtccggctagtcacggcgctgccgttaccatcaccactcgcgcccgtgcccggtgcacccgatcgtgagggcgcggcagcctggcctggggcggcggatatgtctcgcggcggggagatatttctggaatctgtggatgcttcggaagaggaacgctgtcgcgggcggtatgtattcatcgtgaccacgcctttggaatccaatacttctatttccagctcgtcttcgtttgatgatgctgaggtgggtactagctctgagcttgcgcctagcacaatcgcgcccagggccaggtagtcgaatacttcgcagcaataccgccatacattggcgctgccgtattttcgaatgcattcgtcgtaaaaaccgtatactgttgtgatttggcgtgattcgtggttgccacggattagggtgatgcgatcggggtatcgaactttcaagcaaaggaggagaaggaaggattcaagggagtagaagccacggtcgacaaaatcgcccatgaaaaggtagttggtgtctggaacatcgccgccgacgcggaatagttccatcaaatcgtggaattggccgtggatatcgccgcaaatggtcacgggagcgtcaacggacacgacattgccttcttcgatcaagagctcacgtgccttgtagcaaagttcgcgtacttggctttcggggatcaggcgacaggcccgcagctgctcgatcgccctgttagaaacaaaacattagtttgacggtgaacgatggggggctacagatttgaggggttgatgccataccggtctaggttactcatcttgtcgaaagagggtgaaggggggaaggaaggaggaactgttatcgaagtcaagaaatccccttaaatagaaatcagatggctcagttctccgaaaaatacagtcccatcttcgcgaagctctgatgcgcaacgcagaaacttgggggaagcggaatatccaatcacgcgggagccagataagattagatgcacccgaagcccttcgctctcgtcttctctccgcactctttcctttgtgaccctttacatctgctattggaggtttaaaagtttgtcaacttgaataattctcactaaacattcaattgaccttcttttgcctgctattccttctcttcttgtccgactatacccgcctgcctactccgagccctccgatggcctgaaaaatccaagaaacagtcggccacgcctacctcgtctcaattgaacatcaatactcgttctctctcagttcacacacaatgccaccacatctacatcctcggtcgcggtcaactaccggcctattcgccggcacccttctcgcatctctcctagttgtgggaatgccgcacgtcttcccttgcccggccccacgacgtacctttgccgattcggagatgaccatgacagccaatggacaacaaataccacgcatccgacgcagacgacggaaggatggtgaagtgggcccagatgacatccagctgggtcagcctatgccagatgttgtcgatgaggaggtctcgacattccttcagatgaaggcggaagcagagaaactctcacacatcaatcgagaatgtcctgtccccaaacccaagggtgttattggggaattgctgggcttccgcgatatccatgcgaatgcccaccaccagtcaaccgccctgtccgaaggagaccaatagtgcgtgcacatcgacactctccttcgatctttttgcactttgttttctcggcttgtttaatgataccatggaatttgacaataagggtttggtggaccggtgaatgtttggaaaaaaaacaccctgcgagctagacctacaacatgtattctctatgtatagtgagatgtataaaagaaataccaattatattaagactagaaatagttgaaattcagacaattgccttacccacaaggtgttacccccaccttaaatgcagttagttgcagacatttatttagtacggcggagccagctccagccaccttgaatatttttcccgtcaaccatcgaccgtatctcgccatggcatcgacagacaagagcttcgtctacgacgtgctcactaatcagcgtcacacaaaatggattgcagctctactcattctaggcgacgcgttactctgcactctcgtcatatggaaaatcgcttgtaagaccgcgtccattgggtaccgaaccagatctagctaaccaagcaacaaccccagacactgagattgactggtcgacatatatgcagcaagtttctctatatatctccggtgaacatgactacaccctgatcaaaggctcaaccggtccgctcgtctaccccgccgcccacgtatacatctacaccctcctctatcacatcaccaatcaaggccgtgatattctcctcggacaggtgctcttcggcctgctctacctggctacactggctgtggtagttgcctgctacaggcaaacgggggcaccaccctaccttttcccgctccttgttctgtccaaacggctacatagcatattcgtcctgcgtatgtttaatgatgcggccgcgactttcgctatgtggctcgctatctacctgtgtctgagacgcagttggacggcgggaattgcagtgtggtctttcggggttgcaattaaaatgacacttgtgctgcttgcacctgccattgcggtcatcacccttctcagtttgggattggtgcgaagtctttcgcttggagctatggctattcttatccaggtgggttcttctcaagtcaatgagttctggggagtgggctaacgaaagaaactacagctcctgcttgcacttcccttcctccagacgaacagtacaggctacttttctcgggcatttgagctatctcgccaatttgtgttcgaatggacagtgaactggcgatttgtgggagaagagacattcctctcaacggagttctctgtgggcttgctagtgctgcatttatccttgttggctatcttcttcaaaaactgggtaaagccttcagggtcggacatggttcccttcctcgaagaaactctccagggacgccaaaagacagttacactcccaaaatccttcactatgaccgtgatgttgagctcactggccatcggaatgctatgtgccaggtccttgcattaccagtttttcgcgtatctcgcgtgggctaccccatttcttctctggcgcgcaggtctccacccaattcttatgtacgccttatgggcgctgcaagagtgggcttggaacgttttccccagcacaaacacaagctcgacggttgtggtgttgtcactcgcggtccaggtctttggcgtgtttttcaatggataaagcgaggtagttaagaagattgagaaggggagcaaccgcggcaaggcgattgtccaaaaatgagagatatcctggccccaattcatactgaggtgtgcatatttcgagaatcattgttgatagcactgaatcctgtgtaccgtagcaaccattgaacaaacgcttgatgcctttgaaaggcgatcattcagtctgattcgtccgaggaaggcatttggcctacacgagactcctcttcgtcgtcagagtcagcagccaatacaacgggttgtttcacgaattccttaggcctgggaaagcagttccagttagcgaacgagtccaggcttcttaatcgaaatcacataccaaaagcgagccttcctccaagccttctcgtccctgacgatattgacaatttcccctccaattttattttcccgctcctcctggcccttagtatcgaccacgaggtacgaactgcgcttgatccagatagccgagcggaatcgtgcaggtaattcgacgagcatctgcttcttgtctgtctgttcgactaggtagatgttgtttccggtagctttgattgctcgcacgatctgctgagtgtcggataactcgtctggaggggtcaaggttccctctgccgtagccatcatctttcggcgaggcggtcccattgttgaagatgtaaattgaaatttatggtcacgaatgcagagatcgagtgcaagagaaagttgggaaccttggaaggaaataattctccggaaattaactgatcttatcggtggggcaggtttcccctgcccgcattactccagttgcctcatactatggccttggaagattgtgccggtatgggatcaaatcagcattttgaaggagaagtttactcatttaatgttcctccgggggcttgggtctacggttatatctgatcaggtaccaaatgcggcaatattgaatatccttcacaagaaggctcccttgatctgcaagcttctctcttccgcctaccaagtcgtggtcccccaagacgaactaaaggccaggcgtctcagactatgaattgaattgacgactttggactcagttcgcgatgtacctcgtgaacttcggcaatatcatggtagtttgacacaccgcctttcagagccgcctcgcgttgttgtttaatctgcatctttgtgagtggtgtacagtcaacatgcccaagggtcccaattcaacaaatggacgcgtctccaagacgtctgcccctactcggtattgaatgagccaaatatcgccgcgttagaacgagagatcactgcacctactgatcaagtgcaactaaacacgttccggctcgtccagctcgtgtagctcccaattcacttgatgacgtacaagagaacatcttgattcagtggaatcggcaggtgaaggagctattagctcttcctatggggcctctcatcaccataagcgcaaaccaaattcttaatggagatgggaacgacaccactgtcagcaaggcatgggttgatcgcttcatcaagcgcctgccagatgatctaaagccacctaaagcacgatcagtcaagaaaaaacgtcttgatgcatcagatcaggagactttggaacattggtatggacgtctgaaagctgtcattgccggggtttccccagaaaatatctacaatttcgacgacaccatcttccaaattggcgagggagtgaaaccccaaatggtcgttaccagtatgggattgggattcgcctctcatcaaactagaacctactgtgaatggataaccaccatcgagtgtattgccgccgatggatgggcagccgatccatttatccttattcaaggcgaccactattacgacgagtggttggaatacggaggagctcccgatgaagctgtattcatggtgaacccgagcggccgggttaaagagcaggttgcatgcgagtggatcgagtgtttccatcgccagaccaaagatcgcactgcggacggtcaatctcgtctcctactcttcaggggccaacctcaatatttgagttacaagttcctcccgttttgcgagcaacacaagatcattccctttagctttccgcccaatataggacatctcatacagccttttgacagcaaacctttcaaaaattacaagcagtattggagaagtcaaggccttattgcttacatgattgacgatcccgatgatgagaaaacagccttcatcaatggcctccctaagatccgtgaggaatcattcaaacctcaagtaatcacggacgcatttgccgacagaggcattgtgccatttgacccgtccaaataggtcaaccactttgagaaaccccctccatgatggcagacgcgctttattatagataggatttcaccaccaggagaattatatgtttcgtatcctactaggtactgagaaaatcaagattgggatgaattggtttgtttggatagcatgcgtggattattacgcgtagtacgcgtggtattggcgcacaaaggataagatataggatctattcattgcggtttcactcgataactagtccagcgtactatgcagatagataccttccgttacaaatgttcctggaacgtgattagaatccgataatagggtgcaatatagaccgaacccctgcttcatattattgtctccagcagaagaatgatcttacatttcgccaaaattatatatcatcacctcattttcattagctgacaaatgtaggatctaatgctccataaatcgggcttaatctgcacgataatggtagatgtaagattaatgtcctatgcattcaattcggagcattggccttgcaatgtatctaccgtgtctccatccattggctgtgaaacgagtgacatcaccattctaagccgaaaagacagagagacgactaaatcatcagataccaggatctccctcaatgtatacagtaaggggtgagtggcacgatctctgtgcccgatgagaaatctgacaaggcggtgacacttccaattataatattgtacggtgaagtgccaagtgtgtcgatcactggtcaaaggcttcggaagtatgtgtgtcctatacgatgtcgtgtgtctgtagatagcctacatagggaagagtatgcccgatttgggcaatccataagcaggtatcaccacgtacatatgtagacatagctacatgtatcttaatctaagatatagccctagatatatgcacatgtacctacttcgtatgtatggactgttactactttgtgctctaacccgacttttcgccacttccttatcggaggtgcgtggtagtacggccttcccaagtaactcccgcgtgggcttcttccctggatctaatccatcggggaaaattaaacgattctctttcttcttacctccatcgatctctttctttcatctgctttttcctggattttatcaatccaatttcggctgtaaaccaactgggcgatcatcgcgggcagtctgtctcacattttccgaagtggcattagttacccgtgcccgttgcgccccttgtcaacaacagccccgcgaatactctcccaccaacaacccactttgacctggcgcaagcgcacccttgaattttgagctagccttgctctttgccctcgtcaaacctgtcatcatggatggggacgagctgatcgcctcggtcttccgcaagatcgagcgggagaaggccctcatcaccgctgccagtaacatgcggcagtcgaccgacaatcccctcgtgcaacagagagtcgatgccaacattcgcgatggtcgcaagaatatcgcttatttggaggagaaaatgagggaattacaaattcgccagatgaaccaggaaggaggcccggctcccccgcccaaaggccatggcgaaggtgaacactacactcagggcggctctggctcgatgccttccggtgccccattcgccgatcctcgaccttatgctccgatcccaaaggcgcggcccaattacacgaagctaggtacgttcttacatccgttcggaaatgctgcgctgagcttaaattgcttggaatgctaatatgaatggcgatgtctcagatctgatcaagtatgacactccgtacctcggaccgaagatccagctcatgctgtcccaattggagttcaagctgagcgtggaaatgcaatataaagccggtattgaaaagatggtccgcttgtaccaggatgagggcgaccggaagagccgagctgatgccgagggccgtcgcattgagagcaaccaaaagattcagcttctgaagcaggcgctcaagcgatacgaggatcttcatgtggatattgaatcgggcgatgcgccagacggtatgagaaatataacaattttgctacaagtataacgcgacatggttactaactggtggtacagatgagagtcttagtactccgaacatgcgcaagccgctgacgggtctgctgacaatgcgcatccatgcggtcaaggacgtggaccatgcggccagttcgcgattttctcgaggaccggagacatacattgtcgtcaaggttgaagacacgatcaaagcgaggaccaaggctacccggaacgataaatggttagacgaaagcttttccatggacatcgataaggcaaacgagattgaattgactgtctatgacaaggcgggagatcgcccggtaccaatcggtatgctttgggtgcgcatttctgacatcgcagaggagatgcgtcgcaagaagattgagacggagctcaacgcgtctggctgggtatccgcagataagatgggcgatggtggatcccctcgacatgatcaggctggttctcctatgggatcttcacatggccctggctccggaggacgaccaggcacctcgggacatggtgcacatggacacggtggcgagagctcaaatgctcccccgactgtgacgatcgattcatggtttgccctagaaccggttggccgagtccagcttcaaatgagcttcggtaagcctaatatgcattgacccccgaagaagagaccctatgtgctaactggatatagccaaacaattaaaagaccgtcgtccctttgacattggtcttaaccgtcaaggtgccgtgcgccaaaagaaggaggaggttcacgagaagcagggccacaagttcgtcacccagcagttttacaacattatgcgctgtgcactatgtggagaatttctcaagtatgctgccggcatgcaatgtgcggattgcaaatacacctgccacaaaaagtgttaccccaaggttgtcaccaagtgtatcagcaaagccaattacgagaccgatccggacgaggagaaaatcaaccaccgtattccccaccgattcgaaggcttttccaacatctctgcgaactggtgctgtcactgcggctatctccttccgtttggacgcaaaaatgctaagcgctgctctggtaggcaatattactgacatcgcagcttatttctagtccatgctgacctcctttacagaatgtggtcttacgtgtcatgctcagtgcactcatcttgtgcccgatttctgtggaatgacgatggaagccgccaaccaaattctagagacgttgattcgtaccaagaatcataacaagtctgcctctgttagttctggcctcagcaaccgtacccttcgagcaggcggtcccccggggccccctcaagacaacgctgccctctcctatccccagaaaccgatggaaggaccctacgggtctattcctagacaaccctccgcagaagcggtaagcgctgccactaactccttcgcaaccccacagtcaccaacagctgctgcacaggctgcacagcgccaacagattccaccgaaatcgcctcctggaccttccgccgccgctgccgccgccgctgcagctaccgggctacgtagcccccagcaagccccaggtatgcaactaccgattatgcgttgaagagagactcttggtactaatcaaatcttagctgaaatgggccgtcctatgctgccaccccaggcacccccgcagcctcaacacgcccattatgacccgtccgcttatgccaatttcccgcagcagcctccaccccaggctatggcggtgcagcctgcggcttatccaatggcaccacctccgcagcccatccagcaacagatgccccaacagcaagttgcacctcctatcaaggacgatgctgcagcgcaggcaaaggctcgcattggattggatcacttcaatttccttgctgttctcggaaaaggtaatttcggaaaggtcatgttggctgaaacaaagagctcccgcaagttgtatgccatcaaggtgttgaagaaggaattcattatcgagaacgatgaagtggagagcaccaaatccgagaagcgtgtcttcctaatcgccaacaaggaacgtcacccattcctcctcaacttgcacgcttgtttccagaccgaaactcgtgtctatttcgtcatggagtatatcagtggtggtgatctcatgctacacattcagcgtggccaattcggtctcaagagggcacagtaagtcctacgcttaatcttggttcttttaccggttggaaatgctcacatctctcaggttttatgccgctgaggtctgcttggcactcaagtacttccacgagaacggtgtcatctaccgtgatctgaagctcgataacattctgttgaccatggatggccacatcaaaattgctgattatggtctttgcaaggaaaacatgtggtatggcggtacaactagcacgttctgcggtactcctgaattcatgggcccggaagtaagtgggatcaggttttattatgtctttctgcagtaccgatgagctaattttgtcatagattttgctggacaagaagtacggacgggctgtggattggtgggcgttcggtgtcctcatttaccagatgcttttgcagcagtctccattccgtggtgaagatgaggatgaaatttacgatgccattcttgccgacgagcctctctaccccattcatatgcctcgcgactccgtgtcgattctccagaagctgttgactcgtgagcccgagttgcgtctgggttccggtcccaccgatgcccaagaagtgatgtctcatgccttcttccgcaacataaactgggatgatatctaccacaagcgggtccccccgccattcattcctacaatcagcagtcctaccgataccagcaacttcgaccaggagttcaccagtgtgactccagtgctgacccctgtacaatctggtaagatctttattatctgcttgctgggagataaattttaactaaccgatcctttttatttagtgctttcgcaagccatgcaggaagaattccgcggattctcctatactgccgactttgcttgattccaccgacgtgtgatcgggataattattgctcgcttggacacctgtcacaagttgttgacgagagtgttaattcggttcatggggggtttaatgccgacacgtccggtttcttcagggcgctgcgggtcctccgccctttccagcacttctcgctcttcaaattgcttcaacatacccaatttcagtttcgtttttaagtgcaggcggacctcactgacatgcttcgatcgccggataccatggttaatgaaaccttcaggttgcttttgctttctcgatttctttgtgtgcttatctaaattgcttgctctatttttcccctctcgagttcttttgttctgtctaagttttctttccgactggtcgggtttatgactctattctatgtcgggcatttgatgtccaaaaatggagaaggggcgggttcccatatgggaactgtgtgaagtggttttaagagagtttgatgagaaatgacgaagtttgaagatctatgaagatagcgtaggtccctccagggactcgtgcgcgttatgtccggttttatgttctagcggttcgtggtatgaagagagggagatacaaatacgaaataatatatcccatctgtctattttgtagttggatcacggttttatattcacttgaatctagattcacatgtgtctgcccccgccccttcccagttgagggctgccctacctcgttccttcccaaataggaagccaaacgtgccttcctctcttgcgagagcacccgttttgtttgtttacctttgtcctctcttcctcacctctctacttccctacttcttctttttcaatttctttttatcactgttcatccaaccacttttctttgttccagaaatagatcaagctaccgaggtctatttcgaagatgctgccaaagattgaacgcctgtttcatcggggctatcgggccttgagtaaatcagtcgggaccgtgacttctaacaacaaagagaacctgccttcggtaaacaaagaaccctcgccctcgggcaacaaagaacacaccccaaaggcgagccaagtgccgtcaagttcccaccccatcaggaaatggctcaaaaacgtgataaaccctgtggatgggtctcccgcaaacaaggtgagacctaaagtcgatgatattgacttctacatcgacttctctgagacttcagaatcgagatccaccccggcctggtctaacgagacttgggataaccattagagttccgtgcaactcatcactccccccacggaccggacactatgatccaatcacttccttctccctctcttgctactccggtccagccacaaccgacggttgaacctactcctctcgaccgtccttccccgtcgctgaacactctttctggcacgattattcagttcagcgaacatggtcggattgtaagttttgtctttataatggcttattacatcactttaaccttagttatctctctcttacagttcttttctcacttacatattactgactcccataccaggcgacctcaaccaaagaaacagccttcttccccgaggatacagagcctcagtatctggctaagcaagttaagctcgagccacaggattctgttacaaaacgcaagcggtctgaggacactgacgtcaatgaggacgacaaatgggactccgagccgcccacctcacctgaatacaatatttctattgcgagtgatggtggtgatagcgataccagcgacgcttcttcatcaccacacgcgaagcgagtaaagagagctgctttacatccctcggtcaagagcggccgctcgattaagcccaaagtcggaaagaccagaaggaagaagaagaagggaacatgggattcggataggtcaatgtctgagccaagtgacctcgacgagagcgaggaagaatacatcattccgacaggagagcgcgatgagctgctcaataataagctgacccgagaaagagcaaagcgcctacttgaagcagtagaactcccccagggccacgacctgtcaccagacgaacagcggactgctcatcaacttcttactcgtggctgcatgccaactatccaccgacattgggagaaagatttctccacccttccagagtccctgttcttttctgggaaagatgatgaaggtcaacgtaatgaatccaactttatccttgaaaacgataaatgttccgagttttacgcgatccgcgcattccaagagcttttgaagatatgtggtaatgtgagggactattgcaatatccttgacatatgtcctgcaatctacatcaagaagtcaatagagaagtacttgcgctgggcattgagcgatgccggtgtcagggtccagccgaacacaccccctgtgcacgttatctatcgcaaacctcaggacgaagagccaaaagaagcctttaatagagttgccaaaacattggaggatctatcgaatacctggcagagccaactcgctggaccccatgatggtgaagaagcctggccggcattgatggggctcgttctctgtgggcctgttctttctgtcatctctctggacaccaatcccaatccgcaaaccctaacacacggaatcaagttccttggtcatttcgacctttcagatttcgataatgatgtctggaacaccctggctatcgcgatcatcgtcatgcacatcagaaggaccgtgaccaaactcgcaaaggcctactatcacaggtttgtggcctcgatctttgatggccctgccatgaatttcccggatcctgatcgttaattctcgtcatgctacctcgagatctatgagactctctggctgcaactacttttagcatgtcacacagagctctcgaaatatatatcaaacaaagcttgggaagggaacagtatccatggtcatcctcgaggattcctgcgaattcgatcagccgtaatcactccgggtttagttataggcatgtctttctcgggaattttcgaaccctcgttagaatctagcgcttgagtcatggccaattagttcactgaatgacgtgctataaccttttcctatacgtagaacaagaattgtcgtgcctcgtgtctttggagtttttttatcattagatttcctcctattgtgctatgttgatagatgataggttcacaattacgaatggatgtatggcatgccagtggagctcagtccttgctatgtagaagcactattgccaacggaagtgtcgcgaccaatgcaaggattgattcgtcaaatctccacttttgttgttgaatacttgtttttccctttctgttttcaatttgaaccattcttgtcattgcatcccaatgaactcaatataaagaacaatatagtgtgttttcacgaatccggagaactcccggcgccctaaaaaaatcttccacaatgatctccgaagaccatgggggtatagaatactccccgttgctgcgcaacatcgatccagaagcggcagacaattccaagaagtcaggatggcgacaggaattagcgattatctcgcgatattcagcccccctaatgatatcgctcctacttcagcatgcattgaccggctctagcatcttcatggtgggccatctggggaaacgagaaattggggccgtgagcttggccaacatgacttcccagatcactggatattttgtctttcaaggcctatcaacatgtttggatacgttatgtcctcaagcatatggctcagggaatttgaccttggtcggccttcacgttcaacgcctgacgcttttcatgatcgtcctcacaattccaatcggggctgtatggtggaatgcggatcgaatatttctcctcatcctaccgtctgaagcccaggagacagctcttcttgcagggctgtatctgaaaattgccatcgcgggcgctcctggctatgcttgctttgagtccggaaagcgatttttccaggcacagggattattcagtgctagtctgctagttcttgtattatgttctacgttgaatattttcatgggctggttatttgtttgggtatattattcctccttagaactccccgagccatccactgatttcccgttcttttccagagactgcaatggggcttcgtcggtgcacccatcgctgttgcagtcgcaaatagtcttctgcctatctttctggcattctacgccatcttcattaagggctctgagtgctggcaccccctttctgccaagatgtggcgcagctggggtccaatgttgaagcttgctataccgagttggctaatgatcgaagccgaggtccttgcgtgggaaatcatgacactcatttcgtcccatttaggtgcgactgagctcgcagctcaggctgctatatcgacactttcagactttgcctttcaaatctcattttccatcgccgttgctggtggcacacacattgcctatctgattggagcaggtctcccacagcgtgcagcaacatcagccaacgttatggtttttgcgtccttcggtgcgggcataacaaatatgcttgtgattcttgctctgcggagcgtcatccctggcttatttagtgatattggagaggtctggcacttgatcttctttttgcttccagtgggtgccgtccttcaaattcccgacgccgtggccacttccctcaatagcttgctgcgagctgtgggacgaccggatctgggtagctatgttcagctctcgatctactacctcgtcggattgcccctgggcattgctttagcatttggcctaggttggagcgttttcgggctatggtgtggaatttttatcggccaatcgatcattgtgttgatcgagggtttttatttctggaaaatggtggactgggcgaaggcatcccgagaagctgtagagcggatgtgatcatggaaagagagtttcaaaagccatgaaatatatcatggcatgtacgacgaatataaaacaacaagcaccggccttgttatgtttttggttagactttttttccataatattctcttaagagctcaacgggaaaaggtgtataccctctcctaaagattcttttatctcttgtttacttgtaaatctacagaggagttcgtatggtgagcgaaataacaaacctttatatacttatgcgtcacatgaccggtcccgctgttgacgctattcccaacaccgcaatcttcaactgcatcacccagcattccaccatggatgccgccgaggatcgagacgtgaagcttcaacgggcctctggggatttggtgtccgagttttcggcaaagctgcccttgctactgtggagagcccaaactaggactcccccccgcaccccacgtaaatgggcgcaggccaccaaaacagagaagcttgttagccttgtaagatgcaccacatagctccctcttgattacgtctctgtgtgaatttactgatgttatctgcagcttgaaccctttcaagagtggcctcaactcttagatccacatttgcagacattactgcctcctttagtggacgcttttctagcatatctgatcaagcaccgcacccaatatggctctgtttcgccgaagtcatcccagataggaaaattttatcccctaccaagagctatctgcaggctactttacactttttgcaaagtccgtggcgtcaaagtggttagcaggttcttgaacaatgagccgaaatatcttgattcaatgattcgggccttcatcgaatgggatgaggtcagaccatccaattccgaggaattggtcgaatccgacacccagcgactcatctgggaagaacgctatgtgatgctggtctggctttcacatcttctgcttgctcctttcgacttgtcttctttatcatcagatgacattccggtgccctatgacaatctgcaacagttggcttggctaccatctgaaactcctatggttgctaggtcggttctttccttgtcgttgcactatattggtgcatcgggcaaagaacgcgaggcagcgacagcgcttttggcacgattggctttgcgtggagatatgcaagctctaggtatgcttacaggtctgacgaagtgggcttttgctgtcatccagccgacggagaatgtcgaaccaccatctgtctatgcttgtattggagtgctcacattcattgctcgcttgggtgcatccggccaggtagaagactttgctccattgatcaattatgtcttccagcagacttccagtgtattccagggaaattctccaatctctgcgacaatccagtcttcggcgttggctaggaaaattgttgtcaagatccttcgcaacatcacaaccatggccttatctttgaatgagcgaggtgaccgccacatcacggatgatcagttatcaaccatattggaagatgcaatcgatcatttcttggtctccttggccgacaaagatacgcccgtgcgatttgccgcgagtaaagcactcagcattatcacattgaaattagaccctgaaatggcgactgaggtcaccgaagcggtcattggctcgttgggggagaacatcctcttcgaaactgatgatggctccctcgtgactccatttgaagcacggaagattggtacacacacccttaagcgtaatctcagtgcagtcgatgcccagcgatggcaaggattaatcctgacactgtcacatttacttttccgccgggcacctcctattcaccaactccctgaaattcttcaatcacttgtgtcgggtttgtgcttcgagcaaaggtcttctactggtggctctatgggaactggtgttcgagatgcggcatgcttcggtatttgggccatgtctcgaaagtatacgacacaagaacttctggcgttgcaaccccaggtagtggcgtcacaatctggcaagaaggaggtcgatgttctgcaaaagctggccgtggaactcatctgtgctgcctgtatcgatccgtctgggaacatccgacgtgggtcgtccgctgcgctacaagagttgatcggtcgtcatcccaataccattgcggagggcattcccctcgtgcaggttgtggattatcatgccgttgcaagacgttctcgtgcactaattgatgttgctaaagcaacagcctctttggatctgatttgctggagtccgcttcttgaggctttgatggattggagaggtattggttctccagatgccgagtcccgaagatatgcggctaagtctattggaactttgagtactcaggagctattcaaaaccatgaatctggttttagagaagttgctgcaaatgttctccagcatctctcgacatgatgtggaatctcgacatggctgtctgttatctattgctgccacggtcgatgcctttacctcgcaatgggaagcatcaatggagaatagagataccccggaagccagggctgtttcatctcaagttgccaatatctgggatatctttggttctgcatcaagccctaccgatgatgacttgaccttacatacttcacgccccgagttgacagcagaggcatcatcttgcttgatctcctcactatctcggtctaccaccataacaggcctggctcaaccttcagaatcacttctgaaccgaacactgcacattctgtcgctctgtgtttctcggagcgatgatatctcgattgatgcatcttcgaccgccttggcacagctgttccctctcctatcaccatcaaagcaggaagaaactgtgcgtacttggttctctcatcttcgtgattcatggagaatgccgacgggtcggggtcaaattctagcacttggtacagtgttcaagcaactcgcagcacaaagtgatgtccaagaaaacatcatcaccgagattcttcattacaccgggaaggaagaggttattgagaaaagagttgctgctgtgaagtgcttggccaccggtatcttgccatatatgggtaatacttcttgttcactagctggtacgaaaaaggctaacaagatcttagctactactaatactgttgcaagcaactttgtcgatttcttgaatgattacaccactgacagacgaggtgatattggatctcttatccgagtcgaagcaatacaagcagtcggcatcttgcttcgaagagagttggaaacaacaccacgctcaccacttattcatgatctggttgggtgtctctgccgccttgcatgcgaaaagctcgacaaggtcagactacaagcatggctctccctgcaggacttttgggaatcagcagcggatctacccccacttgaaaggtaatcttaccgataaagcaattatttgatgacggtgctaacaaaaacaggaaatttgagcacttcagtcatgtttcgtcacaagattactttgctcagttaattactctacaggatgttgactggcttcgtcttcctttgttacaaggacttgctacctctgctatctcgggagcagaaggtctcgtccgagcatctcgctcggctctgacccagttcctcaattctcaatcccaatcccgacgccaggagatattgatggtcttcttgcaggatcttgctacagttctagatgacaaccttcaagatgaccgttttgccattcctgcagtcgagtttgttgcattcttgattgatagttacattcctgttatcccggaagcctcagatcctaggtttgtgaccttgtcttcgttgcttatatatctacatcattccctgacatcttctttctagtttccgaaagttgttcacgctggtccagaaagcacatttcagatccgcaaatatagctcgattggaagctgcagtcaaagtttatgctgcattatcaaggattgactcgttacgagggggtgttttgaagaagatgaccgggctgcttttgcatcctttcccaaaggcacgttagatctcatacgtatggatttacggtactgacagttgggttttaggtccgatcaaccgccgcagaatacctgtttgttgtgactgactctgaaattgtcaagtatgaagactggtctgtttcgcctaaacagctgaagccccaggtggataatttgaaggtcgctctgtctttgaaggggtagcagcccacagaaatgtcatgaaactcaaatatgcagcgagttaataacaacagctgaaaatataagatacaaagcatggatggacatggggtgtaaaatctttgggctttggctgtgatgagtactagtacttgtggctgctgtgccagtggcagtacttgtaccagtactcgtggtggtacttgttgtgctcgtcttgctcgagtgatcctccgcaaagaaatcaaatatgtattgagtggcattgaattccgacttacccaacgggcactgtgcggcatttcgggtaaagtcatcattgccaacagtacttggccagcaatggccattgtcactctcacggtaatgctgaacgatgccttttagcccgttgcagtcccaagaagcatgcttcacgagcgggtcgtcaaagacagtcacattgctggtgggctgcgcattgtccgcacatccattttgagccgcccaggcctgcaggacatcaatgacgggcagcttagcatccccgtcgccatcgataggcgccgtcgtgtcaaccgtaccatgaaactccaagaaaggatacccctcatcccgcttagcgggggcgcaagaccccacacccttcatgtcggctgtatcataccaggcgccactgacagccgcaaaagccgcaaaccggcttcctacggtggcgttgcaggcgatcacgctggtgaaaccaccgccattcgacttgcccgccgagtatactctggttgtgtcgatgcagagggtttcttccatgtgcgtgagcagatcgttggtgaagtccaggtcgttgggacgcgacgtgtttgcataagggctggagagccagtatccattcttgctgtttgggtagatggcaattccgtcggggttgaattccgggtttgagaattgtgacagactttcttcctctaccatgtcgcgccccgccccgtggaaggagaaatataccggggttggcgtgttcttgtcatagctggtaggaatgtatagtctgtattcccggtctgtgtttgggagggagagggactcgcttgatcctgctttgggatacttggaaggtatgtcttcgccacagcccggggttttggctatgctgatgctcgtgagggctgcgagggatagcagcgatgtgaggcgcatattgtttggggcgggtgcccaggtggtctagtttcttgagggatacatggcttggcttttatatgggactgggggattgattgagagattgagggattaaggactgaaagatttaccaatacaaaccccttagcctgagcatataccacggaagcccgactgaggaacgaacagagtggatccgaggcacccgccaagactccagtgccacgggcgatctcttatcttttcaaaccttacctttgcgcccaacacgcttaaatgatcgatctacaacaacggaagtcctcgggtatgtatgcgaattattattgccttgaagattagaagccgagaataaacaagacatgaagatccatggatgatctgtccttagtgagcgcttaagattatacccattgaaactttattattcttcatgcatcgaagattggcttcacccatgccaaattgggacatgctaattaaagatgaggaagatcaatggatacagttcaaaaccagataatgtgagatagtacgcaggagttatacccacttcaatatactctgtactgaattataattaggtaggcattggttttagtgtacagtaacgggtagaatagaatatgaaaaaaaaaaagagagcaaatagaaaaataaaaaaagaagtgcatcatccgtgaatcgaacacgggcctcgtcgatggcaacgacgaattctaccactagaccaatgatgctagttcatgtgatgtgaccaattattatgcaagatacccctatctcccttccaatctcatttcatccgcctctagtcaaccagaagctcgacctcgctggtttctagagctccacagtcgcaaacatggctgccgtctcagcagctggtattcccccgaatgcgacgtgagtactatatctacatgctatgtccccatgctaacaagtcttcacagagtatatgtgcgcctgtccctcccctccatcatatcaccactccgctcccgcattaccatactgaccgattgcttccccctattaggtcaagaatctcgacgagcgaatcaagcttgagcagttgaagcatgccctggaggagatcttttccgaatatggcaccattctagaggtcgtcgcaaagactaacctcaaagctaagggccaggccttcatcgtctttgacaacgtcgaatccgctacccgcgctattgaggatatcaacggcttcgatctctttgagaagcctatggtgctggattatgcgaagacacctagtgatgcgacagtccagcgggagggtggcagcgaagagctcgaggctcacaagcggagacgcttagctgagaaaggtacgtttaacagataccggcgcactaaatacaaatactcaatccgtactaatgattgtcgttttacagagcgcaaacaagcccacgaggccctcgaagcacagaagaaactcaagcgtcctgctgccgccgtcgaacccgcacgcccagccaagaccaccaaaggtgccggtctcaaacccaccgctgccgctaccaccgctgtcgtcccagacgagtacctcccgcccaacaagattctgttcttgcgggaactaccagaagacgcaacccaggaaggtctgtctgctatttttggccggttcgaaggatttcaggaagtcagattggtgcctggtcgcaagggaattgcattcgtggaatacgaggccgaggctggagcaatcagcgcaaaggaggctacatcaggcatgcccatgggcgaccagggcaaggcgattcgcgttacctaccagcgacagtagtcgtgggtggtttgttgcatcctacaaaatatcccggtctcgttctttctggcgtttggaaggtcttgtctcaagtacatgtgtattagaaatacggagagctttatggctgtcgtcttgctttcgcaatgcgtcaacattgcatatcacatgaacttcaatattccacaaagtagatgaaacgagtcatagggctgaaacgagtatgagcatataacgtggtacatgtcacggtcaaaaaagaagatgtgaacaagaagagtatcaatacgaaacaaaatagcagcctagaaaatgacatcgttgtcttcctggtcacccagaacatctacggtatctgcctcttcaacgaagagagcaggagaagcagctgccttggggtttttcccttgctcttctgctgccttttgccgggccgcgagaatctcagcgtcggcagcagcaacgtctctctgcttcttgcctgagactttcttcaggcggtagaattcctctcggtcgagctcatcgagttcagagttgatgtcttcagaatggttagtctgtgcaagggacgctggagatagatggtacaaacatttgatagtgttctcggtccgaggaataataacatgctcactgttgtatatatgttagtatcctgaacaaggaccagattcacaagttccgatcttacatagcatttactaatcacgcaagttagataccagccgtaagccgtcacagtccatgagaaaatgacttacctcttcggttgacaaccttgatcacttcatccagaatcaagaaagcagtctggcacaattggtgagcaatattcccatacgctacatagataccacgcatacctgtaagcttgccaattccaccaatgtctccacggcccgtgcatatgtctctcgacaacgttgaatctgctgtcctccctttcctagccctgtcagaccgaagtcattgacaccctcctgcgtgtagctttcaaatgtgggtagaagaacaccagaaacgttctcttgcttggttcgcacgcggaaacgagcctgcttggcagactcctgaatctggtagccgatatctccgcctaccgcatagctcacttccgccagtgagaaggcagcaatctgcatgacccgacccatcttttgtttggcttcatcgatgcggcgtgtaatatctgtagaagtatgattagcgtcttgatagggtggggaacgggaatgtgtcgcatcataccgcggaaacgtctgtgaacaggacagagagtcagtatatactccaagaagcaagagaggcacagggatctgactttgttagagcttcactctttctcttcagtaaactatggccaatttccgcgcccttcagcttgttcttcatcaaccccaatgattggcgagtcggaaatactgcctctcggccctaaatagacgtcagatgaagtcaatatgcgggctcagttccacaatagactcaccacagcgccggacatgattgcagcagaacaaatatcacgatatagtccttgttgttcagcttgagcaacacggccacattcacattggtatgacgccgataaagctccaccgcccacctgatacggatgaagcacgtgatataatcaatgtgggaacctcatccgtcaacagatttggctttctacgcgcatgcctgcagtctcttgtttatgcaattttcctttatgctgacacgttgatcgtgtaattggatttcgctcgactgagtggcgcaatgccagggacgcttttgcccccgagatcccaccggcagcacgcagagatggatcgaccatctgcgtcccggccggacctctacttgatcgtgagttttgacccattggaccatttgaactggaagcttacttgcattctaccactagactgatcaagacatcatttacgaacaagatctgcttcgcgacgctagtagtgtcaagccatggcttgcctatatcgaattcaaacagcaaaatggcacgctctatgagcaagcatttgtacgtcgtcacctaccacaaccgagtccctatggatcataactaatataatggcattcatcaggtcatggagcgcgcttgcaagcagttgccgcgttcatacaagctctggaagatggtaagtgacatttttttttcagaagaacttctaagtctttgctcttactgaccttcgtagtatctggagttccgtacaaagcacttgaagggccgcaatcccatggtctatcgcgccgaataccagaaagtcaacgcactcttcgaacgagccctgatcctcctgaacaagatgccgcgcatctgggaaatgtacctatcattcctgctccagcagcccatggtgacccagactcgacgaaccttcgaccgttcccttcgcgcattgccggtcacacagcacaaccgaatttggagactgtacaaaggcttcgctcgggctgcttccgggcagactgccattaagatctttgctcggtacatgcaaattcaccccgagaacgtcgaggattacatagagcttcttgttgaaaatggtgaatatacggaagccgtgaagaaatacatggatatcctcgacgatccacgattcaagtccaaacatggcaaaggcccattccaattatggtcggagatggttgatctcctggtctcccaggccaaaaagatacagaccggccctcaggtcggaatcgatgttgatgccattcttcggagtggcatcgaacgctttgcggaccagaggggcaagttgtgggccgggttggccacatactggatcaccaagggtaacttcgagaaggcacgggatgtcttcgaggaaggaatcactactgtcatgacagttcgtgatttcactctcatcttcgactcctatgtcgagtttgaggagtctatcattggaagcttgatggagggcgcagcccttcgctctgacaagggtaaagccgacgaagatgcagactttgatcttgacctccgcatgctccgcttcgaacagctgatggaccgcagaccattcttggtgaacgatgtactcctacggcagaaccctaacaacgtcatcgaatgggaaaagagagtagcactctggggcgataataagaaagaagccatccaaacctacacggatgccgtttttgcaattaaccccagcaaagcacatggaaaattctccgagctttgggttaattatgccaagctttatgagaacggcggggacttggataatgcaagagtcattttcgacaaggctgccaaagttccattcaagtctgtatctgaactggcagacatctggtgtgaatgggccgaaatggagctccgtgccgagaatttcgacaaagcagtcagcataatggaaaaggcgacacaggcacctaagaaatcgacggtggactacttcgatgagacactgtctccactacaaagaattcacaagagctggaagctatggagtttctatgttgatcttgttgagagtgtttcgtctctggaagaaaccaaaaaggtctacgagcggatcttcgagcttcgcatcgccacacctcaaacagtcgttaactacgccaatctcttggaagaaaacaagtacttcgaagaatctttcaaggtatacgagcgaggcttggatcttttcatgtatccggttgcattcgagctctggaacttgtacttgaccaaggctgtggatcggcaggtcggcattgagcgactccgagatctgttcgagcaggccttggaggattgtccctccaagtttgccaagtctctttacctgatgtacggcaacttagaagaagagcgcggtctcgcacggcacgcgatgcggatctacgagcgtgcaactcgggcagtgtctgacgaggaccgcttcgagatgttcgaattctacatcacaaaatcggcctcgaacttcggtctcacatctaccagaccaatctacgagcgcgccgttgccgcgttgcccgatcaggaggcgaaagaaatgtgtctcaaattcgccgagatggagcgacgactcggcgagatcgaccgtgctcgcgcaatttatggccacgcgtctcaattctgcgatccccggacaaatgctcccttctggcggaagtgggaagaattcgaaatcaaccatggaaacgacgatactttcggcgaaatgattcgcatcaagcgaagtgtccaagctcaatacaagtatgtgacccctactactataaaaccgataacacgttttctaacattatccacagcaccgacgtcaatttcattgcatcgcaagccattgccaggagccagcaactccaaacaggggagcaaggcgaaggtgacgatgaccagcgacgcgcagatgccatggcagaattggagcgtcaagctcgtgccccagttggcttcgtggctgcctccagcggtccggaggggggtaaccgtcctccacctaccgcccaagaaccagctactgccgaggctaaccccgacgctattgatctcgacatggacgacgaatagagggagaagttgatatagggtattttgtcaagaggaagggaacatttgatgaagttttttcttttttactgactcgatttccgatatctttgttctttctgtgtctcattcatcgagttgtatgttgtatacctgctatctctatgcattctagtgtgaatgttttttttttgcggttgttcgccatctcagttcccttttctctgctcctaccacagcagactgcatctcaaatcatgacttgtctttccggttggttgttaaaacatgcagcttgcggctctccgagattttctgctcgattttaccatatttctgtttggatacctgattcaccgtggcgttctagtgttgtatctgtatttgtatagatttctcaaaggaatgattcaactgtgtggcagcttgttcagctcgacgtgttgtaactatgaaggtccattctattggcgaattctaagtcgaaccagccttgacattcacatatcataggtaaacagaaacattggtcgcacgcagcgccgatcataatcgatctatatctacatgtggaacatttgaccccggcgctattctgaggtaaatgtaaaaggaacaggggagccaagatattaagaaaaatacaccatacatccacggaaatggttcagtacttcttaggaggtactttcctctgcctcctgaggagtgtggctctcggtattagcatcctcctttccttcttcgccgtcctgctggggcgcaatatcttcgctcgtctgctctgtctcagtagccttctctgtctcatggggctgctctggggatgagacggcagagcgcggagcaggcgtttcaggctcgttcgcaacatcggggaagatctccaagaagagatcgggcaagaagcggccaaggcgtttgcgagtctcgacccatatttcctccttgcttgggtcttgggatggggacacaaggtagcctccatcagccattactaggaggatattcttcaagctttcggggactgcttctgcctacgagattgagaaaaaagaatttgttagatgggagtggtcatggtatacttgggtcgtcgggtagaataatcgacttaccagactatcgccctgaccactgttcatcatgcgatcaaggatgtccaggatcctgagccagagagggagcatacccgtccggttggggagctgatcgaggaagcgcaggaagatcttgcagaccaatgttgcggcttggaatcgggtctcgctcataccaacagggtcggagtggtagacctccggcttcaaaagaagtaggacgagcgggaataggacttcatcgaagatgctagtccactcctggtcatcgcttgagatcagttcggcagatagaagagatcgctgcagcgtggaaatagcatggtgtcggatatcgcgacacgggttgatgcattgactggtcaaggactggaagataggcgaccagtaggcagcccaggctagaaatgcacctattagaaactcgttgcagtagacatgtcagaggatcgatcgttaccttcattctcctcaagatgagattgtttgataagagccgggactcgtccagtcagatgatagatcagaccgattgccttgatgccgcgagtcacaacttggttctcactacggaaggagaagtaagtatcaacaatggacagaggtgcatggtacccttaccttgacttggattgtttgacccccttattccgacgggcctgagcatcccggtgtcgttcctcgatagaacccacacgcccggcgctgacgaagtcattggccaggctgactacgaactcatagttgtcggctgtgataatatcgggcattgactcaacaatgctttgtagaagatcaaagacaagagaagcgactgcctcgtgttgatggagtctttgcaagatcgaccagaaatccggagaaatagtgatctcgtttcttagacggcctgtatgagcaatgcacctagcaagacccttgaccgtcgccacggccacggtttccaaaatatcctggtcgaatccagaaatagcgtggagcacaacgggtacccggataaagtgttggtcctagcgtgggatcagtaaaggagaacctacatcaaagccacagggtaaaggagagtacatacatggctcagccgcaagagatttaggaggtaagaaacaacacgagacacggttagcggatggagattcttcgcatcgcgcaccagtgtttgaagagttgttgccaggttttcaccgagaacctccagggtcttttcgtcacgaagagtgagcaccgtcgccaactctagaacgaatatcatcgaaggatcgtatttaggttggttagggtcagctctgctgttggcaacccttgacgttggtgtcgggcgttcgggttttacgacaatgactgctggtgcgttctcctcgggaagcaacgacagcaaagcctccacgagcatttccaatgaggacagaggaagagatctgcggaagaagtcagtatcatgaccacaacccatcaatgaaacatctttactgacttaatatttgtcaaaatttcggatattgagcaggcagtcacacaatccactgtgcagagtgtgttgtcaagttcttcgtccgaaggctcaggaggatcgtctgccgcataacttgagaggtaagatgtgaatgcagacaaaattcccgtgtcgttgttgcgtccatcccgatcaatcacctgtgatggaggctgtagcggaattggagatatttcaagttcggacgtgagtttagcgtcaaacggcgggatgagagagttgatgaacaagttactcaatatgcggacgatatactcccagccttggttgacagttgactcatttgttgagaggactcggaaaagcaccacagttgccagttgtgctctgaagtctcggccaaatttgacggctagctcgcttaccatcacactcttctgaccaacctgaacctctgtgttgagcgctgtactaggaggtttgctagtacccaaagtgctaatcgatgcaagggagaagacgatacggtcgaacgcctccgtcaagccatagcgggcagcaatctgggcacactggtcgaaaccattgaccacgcgggaatatactgcatcatctgatgcagacatgaagacatatgagagggtcgcaatcactggtttccacgtagccgcgaacatttcggcatcatacatgttggtctctcccactatgacgtcgccggcagatgaagacttcagcaatagttccttccaagcatagtcaaatgcatgcttgttttcgtgttcatcgggtagaatgatttcgttattcttgatagagtcatagatatcctcgaggaattcctccgcgaagtctccacccccgttgacgcctcgcaagttccttgcaaagccagcgcaagtcatacggttttgtgacttcacgttgcggttgtagagatcggtgttcagcatgatgatggcgtaggtcaaaatgtatagtgcgtctttatcggcgatgccatccggcttgaccttttcaatgtaatgttccgaaaagatcgtcacaattcgctcaatgagcggcgattcaccaggcaaacggaatgaactgagtagttcccgaagagcttccactgcactacgtccctcgaagtcaaggagatccacaaatgcgcctagcaactcctcgttgccgcgtttggagatgtattctccgaggactttctttgacaggcgtgtggtgcccttcaagaagcgagcaaccagaacgggattattcgcgtcctcaataacaccatggctcacaaggaaggcaattcccttcttaggatcctcattgaacatctgtgcccccttgataatgagtttcttcgtgtggcgttgttttttcaagctttcttgaggaggataatctccttgtataggctcgttatccagccgatcatggatgaactgcacatagcccaaaagggaatcgagacataacgggggtacatttgtagtgctccaagttgcagagtctgggaaagcattgcgagagagcaatccaatcatatcctcgcacaggtcggctcggtccacgtcacaatcatagttgacaaaaagctcaaccataaagctaggtatgcgtgacaacatgccaatgctctctaccattgcctctcgagcttcgggccttcttgatcctccttcgagccccaatctctgtcgatctctaacaggaacaggtgtggctcgtccgctattgggctgcgaagctggctgtttcaccaactttggtgattcaggaattccttcgtagagcgatgggtcgatgccaggttctcgcggtatttccacgcgagggtgcaagcaggccactaaatatgaaagatagagttcctgctgtaatttcaaaactggccggcaggttgataacaaggtgccagctactctcaacgaaccagttagaatagctatgtgttctgacctgactagctgaaagaggtatcgacaaagatcgtccttagccagggcagccagactgggatgccgagcaatggaaggacctgctacttccaaggcaacatcaataattcggagtgccatcacacgcatggcgtctgtatgttgccggttatgagggtccaacaggtcgatcaagacacggaataattctttgatggatggtaaggagtagggctgaagctcggtttcgggatcatcatgcgggctaggtggtgcagtagctgctgcgataccatttcctgcctgctcgggtgatccctctcgactagtactatgacgttctgcggccgatgtgtctgcgctgatggctgacaggtgctgcgaagtcacggtgtctccattaaccgacgggtccatcttcagacgagagggtgggtccttttttgtatcttcgcccgcaaatggatccggtcctgcgggcactccttgatcaagatgcgatagacgcatgaagatcacctggcacattttgaccattgccatttcggcggatctccgaagtacctctgacagacgaccctggcagcacatgctcaaaccagtttccatcatctcacagacgctctcgtcgcccaaaagttcgccttcaggtcgtgaaagtatgccctccatcaacttcagaatcctcaaaaggactatctcgtccgccgacgagtcgctggcctcaaatcggcagtgtgtgatcgcggctgatagtagctgcatagctacagagagccgtggggaattcgggttgataatattgtacgagaggaacttggtaatggagaccaaggcgatagaggtaattgcggcggaggtcgaagaggagcgaacgacctgtaggaatggatgaagtaacgctggggtatcaaaagttcggatatctttgcaatctttcagatcactccgcagtcgtgtaaaggccgatattaatgggttgtcctgcatgctcttccccttcttccctcgcagaccccaccgattagccaggacatgatcttcatcgggacgaggtgacggttgaccagtcctgcgtggaattggacttgagggggcagagttatcccgctcataaacacgagaggctccattgccgcccaggatggcggagactgaggagtgagcccagcgtgcatgcttgcgcatagacgaggtgacggtgatacattcagtggtcaccaaagccaccgggtctatggcaattggaagagaagacgagtccatagtgggatcgagcatcacaaaagatgctcgctgttgtgacaccattttgaaggtcgaacgaaacagctggtctcttgatcatcatactgctgcttgccttatcgagcttagcgtcttccccgcccactcaccgcctacgacaggggctgtactgcacattaccacacaatctgtattaaactgattggactggatgaaaatctgcaccgatgcggtatcaatgtaccatctggtattagactgcatccatggatccaaaatgtttgatttcacctttgttgacatccttctatgccaattcaacactacatgccattatagtcagataatcgcagtataaaacgtgcaaatacgaggtaaaaagccaatcagaagcttcacctacatcatgtatgcatgaaatcatcaacatattaaaccggcgatcatcgatatagtggctgatatatttcccgagtaaacaaagatgagattttcgaattgactacggacattcttcatgaaacgagcgtattaaactgtctagaagataatggcattgtccctcagaccgaattagtattcccgtctattcttgtcctaaaatctaagcttatatacaaggatctgaaagcgtgaagaataaacaaggtgcgaagaaccccatatattcagcgaattatgcagatgtgacctgtcacactgatccttgcagcggttggggatcgcaacgatagcaacggtgttgatagcgttggccggacaaacatagtagagtaaacattaaaaacaagagtgcgggacaggtcgaagtagagaatgtaattcctacaacctaggacatcgggctaagctgggtatccatattcaagtcattcttttattcttttactattcttagcgtcaggcgctaatacccactcttggtctatcgggctatcgcgatatcaacccaccgcttctctgtccccgcgtctcaaaacaaacgcctcctctcgatcttacacttcatttacttaccttctggagattttcattcggatttacgccactgcacgtgcctactccctgaatctatgaattgagtggatatctttggtacctcagcttctatggaggggagcgcgaatgtcgcaatcgctttaccaacaacaggataacacatcctacatgcgattttcaactgtctctcactgctcagcataggaaattttctctcatttaattctaaacattacgatcttgtctttcccgtcactcgttatcttgctactccaacgttccttctgcgacaaaccccggcgcatttcatttgtttatcgcacacggtagcgcttgcccaacatcttctcgcattctgcacttgcattgcaagtgcaccaccattcgctatggcgactatcgcacctccctccggaatctgtacactggcggaccttcctctcgaacatctcagcctctatcacgtcgtcgacccatgtttatcatccatcttcgtcttctatggcgccgtctctaccgccaatgctacagtgagcagttcccgtattcaggcccatatattcacacccgccgggtttcaaagttaccctcggattacggtgtccccggctgcccccgtgtatgctgcggtcaaccacctaccccgcgaaaaacaaggtgatgaggtgtgtcgtggacttgcagtcagcatgctgagatattttgccgagctgtcggagccggtgaagcaccgtctgactggggtggctcgcactggaagaccgggaggaaaggtccccaagatgtttgatgagatgcatgctgcagatcttgccaaccgtatgacaaaggtggatgattctttggagattattcaggatattcggagcgcatatcaggaacgcaaggtaccatgggtcgacattgatgtggtgcttcctacgggtactatacaaccattccaacggcgagagagtatgggatcagatcttgagggaggtcagaatccgcagtatggtccatacacacccctgatagaggcgttgggagatcctatgtttttgccaacagctcgattgaagcgtgcgccgtcccagccgaccaatgtcagcaaatcacggctgttcgcaagaagccagaaagaagctcttcgtcttaccatgtgtgagcttgtggataccgaagagagatatgtcgccaaactttattctcttgtgcatgaagtggccgacgagtttcggcaaaaggccgtgggcagaggaccatccagcaacagccccgacgaggcagctttggcggcattattcccaccatgtttgaatgaaattctggaagtcaacctgggctttctcgatgtcattcgtcatgtgcttgatgaaacagagaaagatgccatcacagatattggtcaggacacggagctgccttctaatcgtcggggtttgccaagagatagatcggatccgcttggaattctggcattcgcaaaggccctctttgaatggctaccacaattttcacagccatatggagactacatgcgagcacatacaggcttcacgcaaactctgaattcgttcatgaaagataagaattctagcttttccaagagagtatacgaaacgggagagcagagactgcgctctctgttgatggaacccgtccagcgactacctcgatacagtctgctgattgacaccatgactagcaatctgcccttggtccatcctgccgtgcgaactctgctaaaagcacgagacattgtgaaggatatatgtgcgctagagaataattccccatcgagccacacccaaagccttcaacgcctccaagagctagtcaacggatggccagcgaaaacattccctgaaggtcggctgattactgcagtcgatttcaacgaaattacccagccgtaccgtctagacacacagtcatctggcagaagcagcacagggatcatgcttctttataagaactgcctagtccttctagagaaacccgccgaaagccggactacggcacgtggtctgctggctgatatcgacaatgcggccgcttcaaccaatgacatgtccatgtctttgccacaatccgaactccaggttgtgcaggtgctagactttcataacgtgcgttgtatgcaatccacgtgtggtcgaattttgttcgccgtgccaatttcagccaagtcctcaaaagaagagacaagctctgacctgcttgcattggaactggctggaacgtatgaaggaagagccaatcgactgatcgaagaaatatccaaggcgaagattgagggtcgattccccgagagtgaaagagaaggaggtaaatggacgctaagaagccctcccaccgggtctgcgagtaacgtgggaatactcgcctgtgtgtgcgaggacggtgaaagtgccgcgctcgaccagattcaggcatccccaatacgcattgtttttgatacatccaaggcgacctgcggtcaaatgttgagaggttccaaccttgaggtcatcatatcaatatctcctccaaatggagatcaatacagactagatatcgattctgtggttggatctgggtctacagatttgatcacggtggacacatttatttccactctttcgcgacgtcgtaagtgaccctcccttgagaattatatttcttgccactgacataagaaacaaagttcaatatttgctctcgcctctgcatagcgcccgaaacccagcattgacgaactcattggttcattctaattttgaaattcttcggtacatcgcgagcagcttaatcacgcaggtcaagtcttcacggggcttccggccaccttcgccgaccaaactaatctcaaacctgttggggggtagccgtgataatgtgcccactctcaaggggccagggtcggccactcttaccggcgaattcccaaaaatgcctccgccaagagtgaatctgtcgagatcgaacactctaccttcggcattcccaggaaaagacaaggacaaggacaaggaaaaggagaaagagaaagaggaaaccgggaacaggatatctgtcgttgggacatctgcctccaagggattggatactcagttcgggttgctggagcagacatttgcagcctatgtgctttctctgcagtctcggagtggaaacattctgggtcgaatgcttcgggtcagagatcacgttgaccgggcgccggtcaatgagctctacaatattttgctagaagacccgagcagaattcaggctgccgccgaagtgccagttgatacgctttttgtcgctttcgaaacctttttggcgaatgcttggagaacaagtatgggccccgtcttgagctcctcttctctgaaatggattcagagccagtttgacaccatgataccgcgggattttgatgagcaatttcggaaatttgtgacagacatgagcccgcaaaatagacgagctctagctgcgattattcgactacttgccgagctactcgatgcatctggaaatgacggagatcgcggtgctttgacgatggcatttgcggaggtactcaccgaagacggagatcctagccatcatgtctcccttttggaccgactggtcgaagactttgacaacctctttgaagaatttattcctgggggtacctcagtggaaggaacactgacctgcgatcaatcgaaatcacatgccaataccgggtcagtcggttccaattcttcctctttccggaaacgcttcggcttcggtatgtctagagatactccgaaaaatgaaggcgaaagcaaagtcgcagcaattctacggacattaagcaagaagcaaagcccagccggctcggagctcaatacgcccaagggttctttgatgcgctcaaagtcgactgatgtggactctcgtctgggcttccttcgccctacatcgcgcgatcgtcctacatcccgtgatcgccctacatctcgtgatcgccctatctctcgcggtagccctgcttctcgcgatcggcctttatcccgtgaccttccgtatcgtccgtacgggtttgcatctgaggagcaaatctcgaggccaggcactgggtacgacaacccaccctctctatcttctttccgaggattctctgaggatagcgtgcgaagaactcgcaaaaaaagaaggagctccctttcggatatacgaccactcacatcatcctcagatgcatccagtatctctccaactcaacagctccgcccgacgaccccttccagtcgccctcaaggagaagtggtaacgcccaccaaccagtccaggcctcagagcagttacataccaacaccacctatgcgtggtcagtcaccaatgcgttctaggccgccagcaaaatccgggtcaccgacgcgactaggatcacccattcgccgtctgtctccgccccgcccttcgacgccgagcaggaaggagaacattgatcccagggctccacagatggagcgtgcatttaagtccaggggcagtgtatcagaatcgccagccgatgagtcaaggaggagatcccaaacgtcaggcatcccccagcggattccgggccttcgggagcggccaagcagcaacgcttccgataccaagcgaccacaatcctcgtctggcttgcaaaaaccacagaaaccgcggatgcaaagcccacaaaaggttagtcacattctatttctttcgataatgagttgactgacatcccttagttacgcgatcgtgttcaactagaaaagagaacccaaaactctacccaattgggcctgaaggacgagctcacggagcttggtaacgaattacgttctctgaagctcacaccaccaaggaaacccaacgcaatgaacttggagtttgattttgaccgtacagacatcaatccacatgctgctaccgccgcgtcccttgaagctcgcatgcgcaatcttgaagcccgatttgagacagttactggggaatacaagtgccgcacatccgctctcgagcgagacctggagtcgtccttggttcttagcgagaagcgtgttaagaaattggacgagctttatcgtgaggcaagcgccgagaacgaggctctctatgatcggtttaataccgagctcagcaagattgcgaaggatgtccgattgggccacgcagaagacgcgttgaagtctcaactggcaagtgccctagacgagatcggccgagtgaagaaagaaaacttccgcttgaaacgagaagtcggaggtcttcgagcccagtcagctgccgctgcactgctgaaggcgagcgagcaatgaccaaatatacagcatcgagggcttgtcccaccatcattcctttcccatattccatacatggttactcaacaacctgacacctgtcacattatctttcctttcaccttgtaacttgataccgcacaaccctcttctactttccttggaacgcctattcatttgcatacatatcatgagcctttcttacttgtattcattcctatttcttgtcacccttcatactggcctatccgcacagatagccatttgaccatgcatgcatagctcaggagatcaagtttttacaaggcttgctttttgtgtgtctaagtgttgttgtcatgtacactaagcctcttcggcatctttacccaccggccagcccatcaggcatagtgcctcagtgtcaatcattttgtacatccactgccatttcagtttccagcgacagcgtagatgtaccacttccacctcgttgagagaagaatgcttagctgaatgaccggatagtcgatagtccaaagtcggcaatgccagtttttgccaaaccttctgacttggaggctttcctggcttagacacgatgccttcccttgataacacaggtaaagtaaagcgcaactgagcaggcgcttcagcagacaagagagccttgacgtgctcaaaagtcccgggcatttcctgtccggcagtaaaatccttatttgtttgccctcgcggcctcaaattagccgcatctttgcgtatccgttcgatatcaattttattgaacgggcgtatcgtaacaggaagacttatcagttcatctgctagttcgttgggatcacggtcgaccggaacgagacgaagccgcatccagtaccggttatcccacaaaacccacggagtaaaactgccactaggcgaaacgttgacttgggtcacggggtcacgatttttcatgaatggttgccgggatagcaaccagatattatcacccccgagccgtggatcgtgggactttccaagtctggaggcttcatttgggagacgctggaacagaacccccgctaccgtgaagccttttcttcgtttctcgtcattggacgtggcgcttgcgccatgagagccatctagaccggggaacacattgtgaactagtggctcatatctgcgtagcgagaaatggctatcggggaagggagagactagttctgtcatgcggcggagaacgatggtctggatctgccggattcgggaggctgataatgttgcgagttgcgggtccatcgatgctggggttttgtctaggaattgaatgaccgctgaccctgccttggggttgaaatctagcatccggcattgagatgagaggaggtagttggacagctcgtttgacctctgaaggaggtcttggcttgaccgaagtagggagaggatggattgtgattccagcgcacggggtagggagtttgaggtgcgaagactgcggatggcgttccggggagtgagggttgggtcgaaatttgttgggtcggagacgtaagggacttgatttttgtggcaggtctccagaagacttgttttggcgaaggagagtagaggtcggcagacgaatatgcccgggcttgccatttttacattggatatgagattggtgtgagtgttacctgttctagcggttgggtcgggagaagtgatgtgaccatgtgtctggttatagaatcggactttggcttgtggttttgtcggtcgttttatggggattgatgtagtcgaccagctttcagaagcaccgaagataccatggcattcggggattcgagcaacttcaggaatgccaccaagacctaagccagttgctccagccgagagccgcaaaatggtggtttcaatgttgtcatcttgatgatggcctaagagcaatgtttcgagttcgaactcataacaagctatgccaagggcttggaaacggagacgtcgtgcatgtgtctcaaaggcggatggcagaggccccgatgctccaggctttggcgacaattgattctgacttgagataatttcagaccagtctaaattaaggatatgtgttctgatgtctgttcaataatggttaaacaatcttctaagatgcaaacattccgacttggaacatacccatatcacgaagccagccagcaaccttttgtgcctccatagtgctttccggacgggaacgatgatctaccacaaaagcagtgacagaaatagctccagcaacatcataagattgctccagttgcttgcataggtatgctagagccatagagtcggcgccaccactgacagcgattcctaccatcccgcgcatcagctataagatcttgagacacaaacagcgagtctatatttttcaatatttaaagcttaccaaacttccgtggaagctgtagagtgtcattatcaccgggattctttccatacttggcgctgccataattgaggcgagcgcgtcgcgatctggaccacgcttgctggaaacaacgctggaacaaaaccggcgatattgatatattgccggccatgtctattctccattggaatcaaacatgggctcgaaaattcaatatcatcgtcgacctatagattcacttcacgcggaggagagagaaccttagggtgatctcgtcggctcggccaatcaatttttccgagaacgtgaccagacggcctttacacgaatacgtctccgagattttatcagttagtattttaaatagtgacaagtcatttttgagatgtttgggggaaatatgtcgggtttctgatgctgacagtggcgtaagtggtggttactgagttccatatgttgctcgcatctaacaatacgagatttagccggcccatgtccttttgtatagatatgttcgacggcggaaaaggggaggaaaagcctgaaatgtgcaaatgacgtttcaatatataaccttgtaagtgcgtgatcccgagatctcatacatcttcgactacagctcgacctcgaattcaccatctagaactagtcatggctaaagttgaatcctaacccctgagttgtagtgtaatccagggaactgggcaggcttaaacctgagttattacatgtagcagattacatatatagcaatcaaccgctagggtaacctctcgagatgatcataacaacaatcggaaccttcgataatccctgcagcggtatatatacgatgccctaacaacgttgactacagcgacttcaccacggcacgtgatatatatataccctgatcggacaaggacgggcttgttttgatgagaatctaccattctatctgttcctttaactatcgcttcgagggaagatcaataggagaagattacctctagttcgacgtttgatctttggaccaacgatccaggaactagtcattggcagacgccatccgattgatcaatcttaaccctggaagaatacatacattgataatgaattggaaatataagttagaaaaacaatttacatatatcaatttatttgcaacaactcttcccaatagtgggcgcttgtgaggtatctagacgacagaaacaggaagaggttacaggtacatcagccacagcaacggctatctccaactgcggcccaataatgcgtgcctcatcattccgacccagacgtatcaaacattcatggtagccctgcaaagcccatacgttattcggatgctgacgagcacgaataagagtgccatcaagacccaggtcagcctggtagacagccgctgcatcctcgacatggccctgctctagcaaaagagcagcgtatgcatggcgggtgggctgcatccagctccagggctcactgtagcccagcccatcgtccaattcaatcgagcgacgtagatgctcgaaggcctccgtgtagttcccacggcggtactcgatctcgccgtccagcatttctgacgccacccctaggatatcgatacacttgttgggccagtccaagcgcgtatccggcactcgatctcgcgctgcccggtacagctctcgctgacgctctgcatccggcacgttccctgttgctgcatatgccacgcccttggcgtagtgcagaaccgctatcgtcatgcagtacagctctggatctgaggggatggcaatcttgataatctcgtcccacatgccgaaccgtatcatgatgtgcgcgcgcacagacatgaagatttcgatgtagtcggccatggccgagagcaattctttcggtaatgtcgcctccatgcggtccactgcggcaaatgcggcctgtttctggcccgcaaacatggccgcgtagatgagggagtggtaggtgtgcatgcggtagacggagtagaaattaaatgggcctttcagcgccaggtatttctcgtctgcaatcgcggcacgttggtttgcgcggacggcgcttcgatagtctcccaccagcacgtccagatgggacggcatatgattgatatgacccgcgtccggaaccagatcgcggaggtagtcggccggtcgcaggcctagttctggaaagggcgacatctcaataaggtgtatgtagatgtgcaggagaccggggtgtttggaggcgtccttatgtttgagagcggtctctagcaccttttttgcttccatggtacgggtgcccggatttggttttccggtcaccatgtcccacaacttccagggcgtgaggctgatcaaggaatcagcgtacaaagcgaccacgtccaaatcatcgctaaacttttcatatgcctctttcattgcatcggcatatgcaatattctgaatggcatattgatccatgctcgcaggcttatcactctgatagcgggcggagatggccttggcgagggcctgttccacggcgttcccattttttacagacaggaagcgagctttggttgcggctcgatatgtgttttccacgacggccgccaaatcgttgccgaggaagtcccagggctggttgtagttgggaccgagagagtaggccaacccccagtaggccatcacacataatggatcatgcaccagtgcctgtttgaaacagacgatggattccttatggttgaaggaatatgcccacacgagaccgcggtcaaaccatatttgggcctcaggactggtggtggtgatgaccttcccgtatgcccccagattatacggatattcgacctgggttgatccttttgtcatgttgctgatatatgccctggtgacaccgtatgatgttggcgggaaggtgaaggagagaatcttgacgagttcgggtttaggcggggttcccgctacttgtacccaacgacttcggacttgttccaatttattttatgttttatgttttatgtgatgctgtgaatctaatgaactattgaactattgtgaactatgcggtctatactgcatcttattggattcccagtcggaatgcaaatgcgattaggttgtactagattgtactattgttagtagatcaccatgtacagccattagaccacgagatatgattgcttttttctcttctttttattgattgattgatctctttgatctgaacagaaacaagagacgtgaaaactatatgcaaatcaagaatgtatggcagttcagcctcaatgttctgcaattcctattttccccgtcgcatcagcccacactttgatatatccccatttttttttcttcatcacatgttgcaccccaattaggaaagacgtctttttaatagaaagggagttcgtacttttgaaaccacctgctaagcctgtcacttggcttatttttgcagggatctctggccaaggcgtgaatacagggttagacacaatggcacatggttcggacgattccaggtatatatcgccacatcagagtagagaccccttatattaactacaaattaagttatgcacctcctcattgacatggcaaacgttagtcagcgcgctagcagtgacgtgggcccaataacacctcggcaggtgacattgctgagaaatcaaaggtggcagtcccaattttgggtataggctagaccgaactataagaaaaagcaaaataccattagctgacttgttgtcttgaagccgcaacaatgctagtggaaggatctccaagcctattttttgtcaaccaataagaacgaagttgtacattgccatcacagtgatctgcgaggtatatagaaaataggccaaataagccggctaaatgtgagatatcggcataataaagatgtgcattcctatttgagacatcttgcagatccgagccaatcctctgtcgtgcactctaggcagacgcttatcttgggtgtctttgatactcccgactactccgtatactttccccagacctttaaccttcctcttccctaccctcgaccgagaattcctgcctccaacaaccagacaccggactgcaacccccacgctcccccgtggaagagcccaaataccgaactacaacctaatcgcccgacatggcactgtcactgtcagcttcacttaaaacatccctactaaactgcggaaccttgatcagtgaaagactcgaagcagctccattccagaccttcctactcttggcatctgtgtggatactctctatcccgactcttgtgtttttgatgacccgctactggccctcgtttaactccaaaaaggccaaacctgaactgcgacgctcgcgcgagaacaccgatgccagtgagacccctgcggggacccctattcaaaccccgagtgagaataaggattgagtcatggggcgcaaaacgccacatgtaactacggggctaggtgggagcaacaccagttcgtcgatcgctctgtatcagccctgaactcggtagtctattttggatttcctggtgaatgggaattgttattggttgctctcatgcaagttcagtctaggttgttcccttcttctaagctaaactcatttaagaacaccttgcatgccgaaggcgggatttgccgtccacattatgcgggggatctacgggagtatatacaacaccggtctctgctttatatactttatattgttattccccgctttgacgatatcatgtcacgaatctttctgctatactctgtaccttaatcagaaataggaaaatgcagtataccaagtggctgtccgcagtcagaagaccttcattgccgggctttcattccctagaactggtatagtatcctccgtaagcttacccgatctacctgcctcattcagtgttatactccaacaggactcggccgagtcgaatacacaaaggaaaagcagccttcctcagcgcctctcaactagtgctggtccagtagtccaatcctacaaaggcaaccgtctcattagcacgagataggagtataccaagtaaaccccaacggtgccatgtctctcctccatgtgtgaatgtaacccaatgcacgcccagtttggagtaaacccgtcagcagaagacaccctccgcatgggattgcctcttcggtcaaggcattctcctcgacgaagtacttccttttgacagctcgagcagaatcccagatctataagaaccccgagaaagaacggagcaaagagagcctcctacccgaccataccaagcaatcatcagaatcatccaacagaaaccaaacacttctccagaatcttcttcaagatgctctccagcaccatcatcaccagccttatcctgggtctttcccagctaagcactggcattgcactgccctcaaccccacccccaaccccagaacccggcttcatcatcaaccacgtagcctccgactacttcccaaactcgaagggcgacctgagcgccttcgacgtggacgtccactatgtgggatattccagcgcgaccgaagcctggctcaccagcctggacccgcactcagccaccagcgacgaagagaaagcgcgcatcctgaccgaagccgcgtacgcgaagaaatacgacgagaacgacgccgacatggccggcgacgtggagtcgttgctcgcgcacgttgccgggaacgtcaccactactaccgcgggcattgcgaagcggtcgaccttctcgactagcgcggcgcatgctgtcctgtggagtgcgtgcggtacggtgttctcttgtattgctggtacgacttgtcagtttgatctgcagattaacagggccccgcgtagccgttgcgaggcgcagggtggctcgaactgctgtgttagttggtcgacttataatgtgcgggctgggttcttctcgagtacttggacggcttgcaatcaggaggttcaggccgagcataagattaatgcttcttgtgagggattcgggacttcggaccagggtggtgatgtttgtctaagcaatcgtgctactggatgtacctaagttgttgaggatgggaagttggggcagaggtggaggatgcagaggcgggggatgcagaggtggaggtggagaaagtggtgttgctataaggaacagggtgatggttgttcaagcttaggatcatgattatccatatgtagtcatggaatgcaattgttgccctttttcgagagccgtcaggatcatatctgatatgatcgttgcatcggggaaatgtgtaactacatagttagtaccccaagctctcttgggtgtccggttagtgcagctagtcaggggccattaacggagtttacaacagaataggctttgaaggatccattgattcgattcttcgccaatattgccgggaacaccggcaacattaatacatgagaatgcaagctgcaagattgaggcaaaagcaaggcccaaagctacagccaagtaagccagatgcgctaacacccagaagaagagaaacaggagatgtgatagacatcaaaaaaatcaagatcaaaatcgaaatcaaataactcgcccatatgtactacaaacccatgcatgtagcattcattgcattggggtaggctgaatatcaaatgtaaaatttgaagagaaggaaaaagaaaaaaaagaaaaaagaagccaacgaaaggtcccaaagactaggttttcattaggtgatagcagagcctgcgacagaggccgagttggtcacagaatggatactcccgggtggtgcatgtgcgtggctatccccgttcggaatgtgggtttcttccacaaggacatggttctcatcaattcccaggagagaccggggcgggtgaatctctttcttgccatttgtcttgtagtagagaaccatgtctccggaggtgcgccagaggtgcgtgcgaatcgttgctagagtcatgtttggtggacacagctggtggatgaagattagcatgattggcgacaataaaatataggagaaaagcttacagtcttctggcagtatagctcgagatactcctctggtggcataacggactccggttcatccgggttagcagggtcgatgcgctctgcgacataagcaagaaccttctttgctcggagcatgcggttggcattaagacgagagccattgttattagtgttcatatttcccggaggggcaccattgggagctggcctggatgaataacgagattagtttcatcaacaacacgcattccagaagatccaaaacatacgggtcgggtttgacgactggcggcaaggtatcatcgaaaggcttcaatacgaaggcgatcttgacctgctccttgaagggaatttgattctataacgaatgatcagtaagagaggaaagaaaatgcgagaaaatagacgtaccttcagaagaagctcaccgagccaatgaggaattgatttcttaaggctttcgaggtcttcaccaacgcggcccacggtacctctgtagagatccgaggcaacggcagtatcgccagtttcctcctggatgaagactgcagtccgggctgggatatccagtcgcggagtttcctcctcagaactaggagaaagagccgtctccaactctcgatctgtatttgtagccagaaattcttcataatcgtcacgaatgcggtcaacgacgccacagagattgggctcatagaccttctcttccttgatagaggagatctccgactcttcgaccttttcttctaatatctgaggcttcgtctccgtagaattgcgacccaacttcttggggaagttcatttggaacttttttccgaatagtgacttcttccgctcttccttatcaggctctgcgggggattgaggaactcctggagttgcatccgacggagacagaagagacttgccggtgtcggtttgttgggccgctagaggccttttcgagaagtagtcacttggtgaaaaggatgatgccccgccatcgacatgggaatttgttagccccgaggcatcaggtgtgtctggttcaaatgcggggaacggagagttgctctgcatggaagtgctcatgtagtttgacgatggtgtgccaacattgatgccaaagccgatgttcgggctaccagggaagtctgagctgggacgcagagtcgacatatgatgaggattcgatatcggaatcccaatgctgcgagggacatcatcgccagatatcgaggtagtcagcggattcagtcgagcattttcttctgctctcgcgatggcagtttggcggtaatcgttgtctcgtcggacttcctcgtctactaccagagcgaacagccagcgcaaaatccatttgccgagattgactgcgtgttgtcagtatggcaaagaatatccgccaaggttgacagtagagcagaataaatagtcgtaggaaatactcacttctttgatcatccctaaattgatacagctcagatagtggtagatcgatctcgtcggcataaacttctgcgtcgaaacagcgattgggctctagaatgactgagagcctgccagtgcgtacgttgatggcacaccaatgtccgatactatcaacggtgtttacctctgactcaacatcatccatatgacgcttgccgaaggtttggacaggaatacactagattcatgttagtcgatgtcttatacttctccggctgagatgctaaatcaccttcagcaggtcccagagaacaacttctcctgccgaatcctgagtaagtgtgcgcctccgatcattcaacatcaagcacttgatcaagccgtgttggccttcaatggtttcctcgggctgtgaatgaaccggaattgtcaggtcaattgtcgccaagttaggctccgaggaattaagtttaggggctgcgccaccaagaatcgaggtcgctgataactgcaaaagagcattatatggaaccttcttcggtcccttctctggggttgcgggctttgcagcagagtctatagtacgtgctgggtcgggggccggctcgatccccactgtgatgtcaacatctcgccagcggttgatactagacttgggggtagctgtccagatgtagtctcccgccgccacaaccttgacaacgccctcgtgctcttgtagtgcggcgacgcagaggccctggtcgggatcggccgatcctcgcatgtcggtcttcgccaccaagccggaacggtcactcgagtagaagacagagagatcggggtggtccgagtaaagagaccacacgctatcattgtgcatggtcagggtgttcatgcatcgacccgctgtgagagaccagatcttgatcgtctggtcagacgaccccgtcataattgtgtcgccggactggttaatcataatagcacgaatgttgtccgtatggcccacgaacttcgtcacaagctttccagaccggggatcccatactcggacgacattctcagggccaccgctagcgagcaccgacgagaccgcacccagcgcatagacagagcctttacccgaggagtcttccccgccggcattgatgttcaatatctccccgccgccattcaaatcccagaggtaaaccttttgatcgagaccgcccgaggcaacccaagtagcctggctaccggggctcgctagggccttcacataatcggtatgctttccaatgcgctccgggacctcagttgactcggagtgcgggcgccagagtcgcacggtcgtgtcggacgaggccgaaacaagcgcggaattgtcctgtgccaagactatgtcgttgatccaatgactatgtgcttggacctgggttttgaagacggtcggacggggcttctggccaggagacgagagcgcagacgcagaggaaagaggaaagtcgagatcccaggaacagatgacaccgtcgcggcccgcggagtagctaggagaggggacgtcatattagtatccgtgcaatccacgtgtaaagaagcctgatttccggaagatcgcgatcgcaaacttggcacgggttcaaaactagatcatggatcccagcactagcataacgggggaaagatacttacaggatggagttctgacggtcgaccgtcaagccattgacccccaaccggtgcccaccgggtgcatcaggcagagggaggactagagtgagagacacagtcagcgacgtgggggtggatacacaggatccaacataccgtaggtgaccctctggtggcttagtttgcgtgccatacatgcagcgttgaaggagtgaaaccaattgcggagatgcgaatgcggagcttatctgtcgaggccgatcgcacgttcagttttggtggggaaagtaaacgtcagagcattcgcgacgatcaaaagagagaaagtcaaaaggccaaggaaaaaagaagcgaaggggaaaacagtcaaatgaggggaagttcagagttggaggcgccaggggtccggagtttatgtgtttatgtgtttggccttcctatgtgatatccaatacgaccttcaagtagaaatcatgagattactcgtctttctccattatttaatagcccgggggcctttcctttccctttctggaatgcttctcggttattttaacgatttgactacatctataagttccatagtcttctatgataccagatatactttttaacaagatacacaatacataactatatattatgcacatccacaagactcctcgtttagaggaacaatccttcagccctaccaatggggtactgacttgcccgctccgaatggtttgacacccggagatcagatttgcgctcagtctagtcaattggatgctccactcgtctcgtatggaatgagacttaagctcgtgcagaacatacggatagagcagcttggctgcatcgccaagatagggcttggtttggggcttcgagaaggctgcagctcgtatagatttgcagaacatctcacaccctaaagctatacgcgtcattctccgtaattgcacgaatgctcatctgattccagaatttcagctatctataagccagtgcagtgggttgaagggtgtaagtatacacaatataaggcttcttttatgttaccgatgagcctgacttcttcgctgattagccaggaacgtctagtccatcttatagatgtgcatctttgattcacgagtcgccaagggcgttgccccaagccttgagcttgcaggccatgatttcctgcgcaaaagggagatggaagaactattagctgtcgagcaaatcccggaattgggctgcttcaagccgagagcagtccgagcaagtaagaagaatgacatataattgctcaaacaactcgcttcccagaatctacagaatctatgctcttccaaccttctatatagcaaaaatatacaaactacaaggccaagaaaaatccaatcaaagacttttctccgcctgtgccgcctggcgtccctcaagagtattcgaagcatattgatagctcccaaggaaaacagccccaccaataccaatccacgtcacacgcggcgtgataccacgccagaaagcaccgggcccttcacgtgcaatgccgcgcacaatctccttaacacgaacaggcgcgtcaacgccacgccgcgcaagcataacccgcgtcttgatcacgtctagcggggtagttaggccagccgcaatggcgccggcaacactgccgaacatggcgcttgtggtagcgggaatctgcgtctcggcgagagacgaggccgtctccgcggttcgcaggtaccgcttgccgtaagcttccttcattgactcccacattgtgaactgcagcacggtgaaggggatctcgcgggcgattgtgatgcccgcgccgcggtagagctcgcggaagacctggctgtagccgcgcttcggtgctggggccgagggcgctgtggttgtacttgttgggaccgcgtgccgcagggacaggatgtccttcagtgcaaggagactcgagccgccgaagaggccggcttgggcacgctgcttaatgacttctgttgggacgcggacggcgcatgcggcgatttcgccgagggaggaggcgagtgagtgtgtgaggattatgtgggagcgggattgggagttagttttgctgttggcagattgaggtacgagcagagtccgcttgacgctatcgtagacgatgaagaaggaggcggcggagggggcagagccaaagaggacagatgggaggccggcatagataccgcggaaggtttggcggagggagacacgggtttggggtgcggtgtggtcgcgtgctttttggagtcgggttttgatggtgtcgagagggtagagagagcagtcgacggttaagcctgcaatcgcgccggactatatagtagagctgttagagggatactcccggagagagctctggagaagcttacaattaatgaccgcgtccacagggaggagaccaatggctccccgtcaggttgggccatttttgaatagaattggatatgaagatggttctatcacaagaacatggccaattggttggaaaagtaggaagggagaacggcaacgacgtaggttgtacagcagcgtaaacggagaagctccgcggatatggctggcagtttcttttgctccgcggtcaggccatccgatatcgccgatcttcgctacgtccacttcaaaagaatttatactatcgtagggtcgacgtttggattgaaatgtatttactattgaagaaaataaagctctttcgcacaagcgtggggcattgacaaaagaatacccccaaaaaaacacgcactgagacatcccacaccaagtctatcagtaccatccatcgtcaagccagagccagtgctccgttttccctcaacatcttcacaagagaaactcgagcgcgataaaatgtcacagaattttattgaagaatatcaactcatctcaaccatggccgggggaatgagggaaaccgccaaatcatctacaatactcgtagggaatcacacactgaacgcggaagggaaggggacaaaagtgccaccccgttctcaaaggataaaggggatatatagacacgaggagaagttgatacaaagaagggatattatttggccctggcagctttgctggccacggcaggggtctgggcggggggctcgaggacgtgggtgtggccgggggcattgataatttcaccagtcacgtcctgtcggcaggcctgaatgttctttacccagtcatccgccaggacctcgtcgagagtcgctcggtttttcgggttggtcttcagcatgcggccaatgatgtaccggctttcccgcggcaagatccggagaagtcgccatgggcccttgatgacctcttggcgctgcccagaaggctgggttgatgtctgaaccggcggtgcctctttgctggtcgttcgggtgggccgatcatgggcgcagttgctggtttggctgatctgcttttgagcagtatcgggaggatcatcctccctctggagggggggttctaatttctttgcttctgcatcttcaggtccgtttccattttggtccgttccagactgatcaggtccgctcgagcgaggggtcaaacgcttattgtcctgggcttgggaaagaagatctggtgtcgacttgggccgacggcgtggctccggttcaggaaccggggtgcctggggtcgggctggaaacgaacagcttgtatgagttgtcggtcaggcgcggttgcttccatgggaaccggcgcaaggtcatacagcagaagatgatcgccagcgaccagacatccgtggggcgagggtcatatttcttctcgtcgtagacctcgggagcaaggtaaggatcagagccaacgatacctggtcatgcaaatcaataaccaccaacggcgaacaaaaaagatacaggattacttacctgaagcagggacaatgtcgttctcaaaaggatagcggaatacgacggcacttccgaaatcaataattttcatgatgccacggtcgttcaccaccacgttatccagtttcagatcccgatgggccagacccatgccatggatgtacgccacaccgctcagaatctgcttgaaagagcaggcgatctcctccttgcccattttgccggtcatcacgatggcaaacagatcgaacggcgcatattccatgacctcataccagcgactgccttcttgaatgatatccaaggtctcgatgatattgccatggtgcaaggtggagccaatacagaactctgcagtcaccttcttggagtattccttcaagctctcccagttgtgacggtctcggaattgcttgactgcaaaggtgacaccgtcactgttgcgcttcaagagacgcaccgagccaccagctccagatccgagcactctgcccagctttccatacttggaattcagaccgtgatcatcggcaaagggaacattttcggtagccatttgatacggagtggactttccagctgatggactcgactttttaggcatcgatgtcggggactcggatcgcttgttgcgatggcccatcttgaagaatcgtttcaattcagacatagagccatgatgctggtggccgtggtgcttatcgctaccgtgctccttcttacttccaaatatgctccgcttgtcactaggtttgctgagatcactcgcgctactggatcggggagccgagggacgaaatgaccgtttgacatcccgaccgctgaagataaagcgaggatccaactgggcaaggtttttggactggggtggtcgcttatggcgcgcatatggatcattaggttcgcccacaggggtcatagtcactggcggagtaagagactcctgtggagtcgaagggggactttcatcttggggggtgctcccgtcattcccgacgaagaattgcgcacgatttttgggtacttggatagcatgaggagctcgctctgagccttcactttttctggtaggctcggtggactgagggcgggaggatgagctgggttgaggcgtgctgttcttttcggttgatccgactggaggtgacgcttcaggggtgaaattagtgtccgcgtggggtcggctggtagctctcagagaagaactgtcgctggttcggccttcgcgagaatgggttgcagctggagtaagagggggtgactgtacagcagaggttggaggagacggacgcggcgaggcaaaggcaccggtgccatgtccactacgatcactcgactcgcgagatgcaacctatgaggatccaaggttagtatgatgacgatattgccacagtccattgagtctccactcagcggcgtcggattgtgggaagtgaatatcactttaagcttgaagggattggaagactcggaagaacacccgacaccaaaaaagagagatagatatggacataccctggaggaaggaagagacatggggtcaaaggagaagttccgcaggcgggactcctgaagctgtgcgccctgcatactcatcgccagcgaccgtaattgttcctcgtccgtaggtcgcctttggtctggctggtctggttgctctggttgctctgatacaggggacaaatctgatcgacctggttcaatctcctccgcgatggaggagaaacggacttggttaggctgagctcttgacttggcatcggcgtcaccgggttccgaggcctggccggggatcttcgcggggttgtgcatactttgggattctagagaggtagacgtgcgtcagacggttggcagggatatgggagacaccatcacaaccgatcaacacggcagccaagacatacctgaacccatggggttggtgggtgttggatcagtcatttcagacgtcatagtgttcgcagttcggcccggaacgtgggacacatgcccctcacggtgggtgagttggagaatcctagatagcgaactgaaaaccagttcaaaagctgtcaaatgtggtcaaatccgcagaattggacggtttcctcccaaacagagcctaaggagtcaaagaccgacgcaagaggcaaatcttttccctttttaacttttttttcttccgccgaatgcgatcgagagcacccgggtctggttcaggaatccgggaatccgggtatcccgggtctaaacgagaagatatgagaagcggagatggttgagggaagaggcaaaggaagtaaaagagaaagagaagaggggagatgtcagggtctgggcctcaggcaaacctgggattttgggggcgagtggggtgggagggagggaggaagacgacgaagaagagagatagtgagggagtggtagtttgtctgtctttgacctcatttactgcatttaatgccctttttttcgtttggcctatttccaatttaccagatgagcacgataatatgtcaaatataccccatatttacccaaactgtccttgaaatgccttacctcataagtcggatggccgcggagagttcaagatgatgtcgacccgtgccgacttcccggaggcgctgaccagacgctgaccaggccctacgtactcccaagccttgctacgacgtatggagtactcatgttgtacatcggtaccctctgcaggccactggacgatgggtctttggatctggaatattgcctgaacgggcttagtatatctgctgactccactagattccctttcctctccgacatcgtaaagggccaggccgtctttctccgctagattctccagactccatgccaagtagcatgtcgacattatgcagtgacacattcagggtctacgaagtcacacacatgccaagttctccgctccgcagatcagttggagtctgtgacctcatctgtaggcttccggtcacttctcttggttgtccagtcatcgccgagaagaggtccacgggaaaaccggggagggtcttagtaggcgtgtgatcacatgtcagcccatttcaattgcattgtggtgattagttggtctatatttgactttataagtcactcttgccgccgcttgcgtacggagtagtatatagctttcaatgtaaatatctcttggatttcaacagatatagacaatctggaaaaaaataataatcggtatcgtacaacgggggaagaagaaaccccaaatttcccagaaaacgcccggtaaaccgatccaaatcaaaacaagcaggccccctggagcactgtcggaatgaccaataattatacaagtctattgtccttgtgatgctcagggaacgacctggataccaatggacttggcctgggacatgacactcttgcacaatccctccagggacaagcctgataaccgcgtctcggtctgcttaagcttggcgatctcataaacgtgcttgagggagatcttgccacaaacatcgtggccaggattcatcgcaccacgcagccggttcttccggggttcgacattggccgcgttgagcaggaggtaagtggtggtcggggtgcgcagttcaaaggagaaggatcggtcggggcggaccgtgacacgcgcagggatcgggacaccggtgttgatgtgagctgtacgggcattgaattcctagagaagtagttaatatacatgaacggttcatataaaccgagtaaacaaagactaaccttgcaaaagtccatggacttgacacctttacttcccagagccggtccaacaggcggactgggactggcctgaccagctccaacgatgagcttcacaaactgatccttggacaatacgtttcgtgccatgatgagaagatgtcgagatggtttccaaaggccacaagcagagaagatcgaactcggaagatttgcagatttgcagattttcagccgacgacgctgattggccagagcgggaagcgagcacaagaaaccccaacgtcataaggtacactcctttctctcctcatcagaagcttctttggcttctaatcgattcatctaaccatcttcatctcgacattcacgatatctagattcaatctctattctcatccgttggatcgaatatctggtgtatctttctcatccggagagtcccattgacatccgaactagaactctcgggccccgcgcgtcgatcttcccttcacctcccttttccttcttctttcttctccagtttttattaattccaaacttatcgaaataatgaactggttaaagtcgacgtacgttccgatcgactcttctctgttgtggttacactgaccgattccatgcggacagtctctccgccgtggtgggcactgaggagcctatctatggcccagaggctatccagtctgttgcgaagcagggcgagaccactcccttctccgatgtgaacaaggagattctgcgctggcgcgcacactcttataccaatgtcgaaacccagaccttttacatcatggccgacaacgggacagtggttttccttcaggttatctacagcaacattgtgtaaggaacactcagccggagcttgaagcttccaccatgaaatgaagacctacagcggctgactctaatccttgatcttgattatagtggaattcacaccaccgcccagttcaacgtcaagattttcgacctcagcggaaagggcgacaacaagtggttctcggacccgctctctaacttcatgttcgacgagaacatgatttctttcggtgccgacaacctgtcgctgaccctcaacgaggagggcgactcctactctatcaagtccaccgtcaacggcggcgccctagtggacatcaagttctcccggactgcacccggtttcgtcgtcggcaaggacggtacctcatactttggaaccgaccccgataagccatggggctccatgcgccacgctttctggccccgttgtgccgccgaaggcactattaccaccaaggacaagacctacgacatgactggtcgtggtctcttcatcatggccctgcagggcatgaagcctcaccacgctggtaagaagccctatacatagactgacaaccagaaccgctttatgctaacaaacacacagccgcccgctggaacttcattaacttccagacccctacctactccgccgtcatgatggagtacaccactcccccctcctacggctccaccaccgtcaacgtcggtggtattgtcaaggatggcaaggtaatctatgtcggcacaaacaacacagtgactcacacagaaaccggccacgacgagggcagtgactggcccgcgcccaaggccatcaagtgggagtggagcggcaagacaaccgacgacaaggagctcacagccgaagtcagcggcggcctcggttcgcgattggatcgcatcgacgtcatggccgaggtgccaggcttcattaagagcattgctggcagtgttgccggtactcggccgtacatcttccaggtatgtcccatcttaccctcgtcttgtttattatcaagatagttatagctaactctccttgtacagtactcgcctcaggacaagctgtccttgaagctgaagatcggcgatgaggagatcaccgaggagggaactatgttctccgagtcgactttcatctcgtaaaggtcgcccgcctaattcgcgtacatagtacctcattctcccctgcgggacttgattgttggcgttcgttgtgatggttttcgtgatgccctcatttatgtctagaggatcggtttgactgcttcttcccttatgcggaccagataatccacagactgtatacatgatacttaatgctattttgaccatatcctgaaaatatattagtagtctgtagatacgtaatgaggtgaagagtacactcgagtttcatagggcatagtgatagaatacatgtaggatgtaagtaggcgaaagttactgtgatgtacaggcaagatcagacgttcccggtgctgaccaagaggaaaatgtacaaagaaagatacaaagtcgaatacaatacaattgaactcagaacaagaaatagaaatagaaatccgccagcggtgctagtagaacaagaatacaacccttctaggaactctagaaaaagagttaaacaaaaagaggtacaaatcaggcatcgaccatcaactgctctccttcatcaagaagagtcgtaacccgcgagagatcagaaatcatcttacggccatggccgaccaacaagagcttctcggcattggcagggagacccaggtaggtagggggttcacgctccggcagattgttaacccagacgacgaactcgcgcatgctagtggtctccggcagcgtcaaaagattgtcgttctctacacccgagacgagcttgtagccatcttcgaaggcggcgggtgtaaggaagctattgaccaggttctcgagctgctggtaatcgcctgcgtcgtcgattttaccaccgtacatctctgcgacaagagtgcggatcatctcccagggaatcttctgcggagccacgttggaacggccttgggacactgaatcgacccagtagtcaatgatgtgggctgagcactcgtactgaggggaaaatgttagcgtctctatggggaataaatggatgtagggtacttacgtcgctgtcgttgaactcccagaagcccttccatccaaggcttggtgcatagcggagcctttcctggacgacggcgtgcaagaagcagagtaagagatagacacgggccttttcgactggaggcttgctggctctcacactcagcgaagagagggaatccttcatgttggcacgcacacccgcgggctgttcgtacatcagcacacgcgaggcccggatcaaattgacagggatcttagggctggactccatagataggaaaagacggaattccttgtgtggtttgagagaatccagtctcttctcgagactttgcagccaagcaggcgccaggtggacgttcttgaccagcacccagttaccgactgcagctgcgttgctgatggccttgtccgcgctttcgagaccttcgttagatcccatggcaatgttggcgcaggttgcgcgggtggcttcaacaagagcgtcgaccttgtaactggcatcgaagccagggctggagctgagcgcgatgggcctggttgcagtgacctggtcaactacatcctttaggtcggcaccaccctcgaacagctcgcggccgaacaccgcctcgacgaaacgctcggcactgggaacaaatcggtccatgcggcaaatcttgacaaggagcaaggaccgaagcagttgatccagttgcgacacactctcgtcccacataaccgggaccacgttctctgcaagctcctcgccgaagaaacgatcccactgttcttgggtgacgtttggaatatgctctttgaagagggacatgttggccagcctcgtcatcacttggtcgcgagtgtccacagaagttgaaagatccgcgtcctccactgtctcatccaggacgcggtcgagaatggtcctgtccatggggaatggggtagcttgagcaagcagaatggcaagtgtgatgcgatccttttgaacgagaccaagggaggttcgcttataggtgttgatgaacaagtccctaacaataatctggacacgcgcagcatgatccttctcctgagcaaggcgtttgttctggtagagaacagaattgaaaatatcgacgaaatactgcagagagaactggtagaagtgattgatgtggtgaagttgttctagaaccgcaaagacggcactgcaggaacgggcaatgatgctgtagttctgcgtaacgttgtccacctcgagcataacaccttcggtttgatccatcttcagagaaatctcggcagcctcctttttgagagtttcaagagtttcaatgacattgtcatcatcgagaatgttaccacgggactcgttgagcgcctgcaaaagacgcttctcgagttgtctaaggtggaccttgaactctccttgcatcttgacaaggttgttgcgacgttcatcgacatcgggccgctcgaatttcaggacatcattcaaagactgtgtttgcaagctgctctgggtgacagtgaagttgacgaaggtagttcgactgcaaatatccggcgggaatgtggcagatggatcccgggtggataggaagagcttgaaggatggcgagaaatcgatttcttgcttgcccaattgaatgaggacacgaccaccagttttctggtattccttgttgagaacgtgattgagaatcgggtccagatgctcggcatcctggataaggatggggtttccgaaacgcaacgcgctctccaattgcttgacaaaggaatcgtccaagaagctcgtgacagtgagtttgcgatctttgctttccttctgtaaaaattctgtaatacggccagagggatcaacaataagcgggtatctgttgaatctcttgagaatgatggcgttctctgtgcaaagatcgtcaacgggaagagaatgactctgccaggtcaagcgttcatcggcattagacaagtattccgttatgggattgtgaggcttgaattgaatgccagatgccgccagttggtggacccagtcctcagccattgccttacggaattgctgatcgtaaagaccagcatatgcaaggaatgcagctgcaatgagaacatcgccaacgagagtgctgatctgagtttcgaatgacttgctcccttcttcccagcgcccacgctcagaggacaaactatcaagcaaacgaacactgcggtcgaccttgaattgaacccgattcatctcggtcttgattgcctgcgtctcgctgataagggcagcgtactcggccttgtaggtggcgatgctagtttcgaggtcattgatggtattttcgatggcctgagcttcggccttggtttgcagggcctgctcctcaagttgatccacctcttcacgtagagggccaacacgatcaaggatcgcagagtagttgacctgggcttcaacccattgcactaaaggaccgcaggccttactggcacggttaactcgctcataggtgaagtcttccttcgacaggaattcattctgcatcttagtacggtgtctgcgcgtcatctggcgctcattgtcgtagttaacgatgctggcgatgaaatcatcccgacgaatgagaccttggattgttttccaactatcgacggtgtgtccgaggagtgtgcatacggcttccagggcaagtcggacgctagccggagggttacccatggaccgaacttccgtgaggtgttgacgtttaatgttgctgacactcttctgggcttccaggacagcgggttcagcccgggccaaatcgttcaacacgacttctttccgagttgccacttccttctcttgtatctctaacgcggcctgcacttccaatgaaacgtgcttccgctgttctgcttcttgctgatcagcgaccatacgctgcaatttatcgttcgcttccgtatccttcttctccaattgtgtcttcttctgtgcgagactagctcgaaggtcgctcactttgtcgacggtgtcatgaagcttttcgagaccaatgttcaagtgacgttgttgctcctcgagatcctcgcgcttctcgttgaaaagcttgacatactgcgcaacaaagtcgagataatggcgaggggtgaggaaagtcgtccggccctgttgtttgtggagccgcccattgaagcgatgcaaggagtggtgaataaacaccatggaattgacaacagtgtctctgtgtgatgctgggagagtcaactcgcggtatgctactgggatgctatcaggcgagatgaagtttggtttgtctagatcgaccgattgagtgagctcggagccaacttggaacaaggcttggtcagaccagtcacccatccagttcaggacacaacgattgaacaaggcgggactagtagctgcttttgaagatagaccctcctctggcgggttcatggtaaagacaacgtgcaggttcttaacgatttgcgaggtgaaccacttgtacagctcctcctgcgaatctaggagcaagccttgacgctgggcaccctctttacaagcagtcatcaatgaggagaattcgtcgccctcaaagagaccagggacttctgcgtttgcaagcaaagtattcatgcgttccaggaatccagagtcaagaacgtttgattcatccatgacaaagcaaatcttttcgcctttgcatcctgcccggcgaagaacgctgcgaagatcgtcatcgaaatcttccgaagagtacttcccgtgtaccttgatctggaagaccttcaaaccattcatccaagcgacgaagcgagacagagttgtctttccacttccactcacaccgataagaatgagatgaccttgaggctggcggaagactcgatcgatgcgtagcgcgtgctcaaggacatcgttgaacaacacaagcggaacatccacctcttcttcgcagaaggttcttagacgtgccttcacgaattcacgcagactctcctgttcgacaggcacgtagttcttggacagccagttggagaacaggataggacccttcaatgcttcttgttcatcgattgaagggaaatgttccaaggcaatgcggcgaacagcatctgccgtccaagctctctcatcttcatccacgagtctgtcctggaatagacgcagggcttcgtgcgcccaaatgcggaccaggccttcaacagaaagggtttccaatggcttgatggcctcatacagaccccgaacccatctagtgagctcacgaggcgagtaaacgtagtggggctggatttggggcgtgaagcgggtttgggattcgaggtagaactgaaccatggccctggtgagggcctcggagtatccacgcagcaacggaaggatcttaagcacagcagagttgaacgtgccatagatttggttgagagagatctcgccggggtagtcgaccatgatcaggggagcatgacgcaggaatctctcagccatcggtgtacgaccagcatccgtaggaggattacaggcaccaacaaattgaatgcgatccagggtgacccaggtcttgtcggtggttcgccagaagccattctgctccacaagttggcgcaggaatgagatggcacgctgagtgccgtagcgatcaggggccggaagattgatctcgtcgcagaaaatgacaagccagcggccgatctggttcggagacatcaccacaccattaagagtcttcttgtactcacagtactgctcaaaggtcttgatcaggaggtcaggtgtggtggcactcgagaagttgagaccaacgacctccatgttcgggagctttcggagcgcggcgaacaatgtcatggtcttaccggatccaggaggaccgcagagcaacaaaggcttatgctcagcaagccacgagtacaacacatcttcatgacggatagtatcgaccgtggggataatgacatcggtttgagtgacggaatgtgtgttgatatcaatcgtgggcacctgtgaatgccaactagtccagtcagacttgggaagaagaacgtcatagtcaatcaaagatgaatcgccgtccggtggaagatcgatagtagacattccagtgatgtattttccgaactccttgcgatcacttagtggacaatcaccggtaagagaccagaccagcgtcagaagaagcttcttggacatgtaggactcaatctgttcagagtccagagggaagtctggatgctggacattgtattcgaggacgtttcggcaggccttgttcaacaagctgaagagagtgttgagggcgcggatatccgtgaactccatgatatggttgtatttctttgcttccaccaaagctctgagaaccaggtcatcaacctccaagaactgtttgaggattgttgcaactgtgtcctgggcatcctgtgtccggattactgctgtccctgcgggagcactgtcttcatccaggtcctcgaatgtctttgtcctgaggctttcgacgtagttggaaatcatcatggttggagtaacagtgtcggcattgaaccacaccataccgcaacgactgactgtggcaagcgtggcatacttcaagctttcaacttcaaacatgatgcgaacatttgaaggtaggttgagacgctctccattgggaagggtgaggagtttgttgtcatctagaacactgttcaggttctcaacccattcagggtcaacatctccgtcgaaaacaatccaatggcgtttgctatcctcgcctcggaggttgtctacgatctttctcagaattccagtgaagagaccgtctgtccattcacgggtagtgctgtcaaggttaccatagagagattccttagacatgaccttagagtcgatgatgtgagagacgccctcaacgccctcaatgcgctgcatcgcttgcagtaaaatcttccaggcagttgatttaccggctcctgacttaccaaccatcataacaccatggtggatgcattgaatttgatagagttgcagtgccttggtgatccacatctcactgtcgacgagatgttgctctttggtagcaatatcacggatcgcttgggtgagtttctcgaagttggcaggcacataatccacgccagcgaagtcttccacctggatttccagcatgatttccacatcttctcgaataagcttaggagcaattgtctcccggagactttgaacaatgatttgaggttcaatgacatcctcggggcctagatctccctcggtactggccagacgcgcgcgcttgagaccgcctgagctaacaagaacactcttcaatgcacggagaccgaagtcgtaatgagcctgcttggaaagtcgggaagcacagtggtcgaagaaggggactgtctgcttggagagagacttggcctgcttgaaaccttgcgagaaaagcatcacttcagcaatcagttccttatccggtttggacatggcaacactgcggaacagcttcttcaagttgtctggcaaattggaacgaccagcgtagccagggttcatggtaatgaaaattccggtgttggagttcacagcgagtcgtcttcctacgagttcaatttgggccttgtcgccatctccgccagttttcagaccaatctggatgttctggatctgctgagagacggccgacaaaatacgttcttccagacggttgaactcgtcaaagcaaccccacgctccaacctgacagataccgaggaaaattcgacccattgcttggaaatcgaatgtgtcgtcacaacagaagacgagggtgaaacgaccgagttgcaggcccaatgccttgactgactcggttttaccggtaccagcagggccatatggcgaaccacccagtctctggcaaagagcctgagtaagggtgaggaaacaacgatctgtgagaggcgtgcggacaagacgctcaggcacacctaaatactcgaatccataggcgagcttcgcgttggccatgtggacatataggcgctccaagaaatcgcccgaatcgtggaagacataacgcatctggagaagccaatggtagtgagttggcgttgtggcattgagacttatgagcttggagatgcagtcgcgctggtgaacgaattccgtgatcatatgctcacacttcttgcgagtgatcggatcgagttcaccaagcaccgtcgcagccagcaactcgagaatccgaacttcggaaccgtgcaacgcagggagggttgcacctccttcctccaaggaatgttgcactgcgttggtccaagtgacctgactggcgaggaccacaatctgagcagggtagttagacaagaagtcattgaaagccgttcggtccacatcgctgctatggtaaagaactccaaattgttcaacggcctcgccgagaagttctgctagagtcaacttcatgctgttctctagcgcggagagccaatcattaatacgaggagtcttgaggaggttaacctctttcttcaaacggacttcttcgccctccttggaggtaaatgcaacaatattgttatcgtcatccatgacaaggcctgacatcccagcgaacatcttcttgaaatgcttggcgacacggaagatatcattgctgttaccaatgatctccaacaagtcctcatctccaacaaagtaaaagcgaggaaatgagacacgttcacgctccaaatattcaccgagtgccttttggattttgttcagcaaatcagccagtctctccaaggacttttgaacatctacaattgcgagaatatccaaaacgaacggagatttgtacaccttcttcatgacagtaaagaattccgagttgatattctggaaacggcccgactccaaaggaagaagatgcttgatgtctgcgttgccggtaaagacgccttccaggtagacccattgtcgctggacgtcgatccatacgtcgaaaaggacatggactcggttcagtttatcttcccatgatgtagcttcttcttcaaattctttgtagtacggagaatgtctcatggcctggagggagttcagattttcgctgcacttggcgaacaggtcgtcaaagccttttatcagacggcatttgttctggtagtgtactaggtccagagaatagttctgccatgtctcccgaacagacttcaggaattcctccaatgccatctcaccctgtgcctgtgcaatgatagcacgaatgatggaatcgcttgatgcgagttgtaaatcccagacatcaccaagggtcaaagagacaagagagaaacgcttgtcgggtttaagactcttgtatattttgtgccaatgtctttccttgacggcttcggatttcatgtctgacaaaagtgagttgactttcagcagctgccgaagaacattctgaatgtgttcaaaggcagcatactgtctcatgcgactgggcatctccttggtcattttgatcaagttgtcaagagactgtcggagcttcctaggttgcacgctggtccacagcccatcgcgaaggtcattaagactgttccagattgttgctagagcagcccagacagacatgaagtcttggacctcctcgaggatggggggaagtgatgactcggaacttgggggaagatcgagagcttccttggcctttgagaccatctcaaactcagactggagagcctcgaggcgagactggaaagagctcagggtgcgagatgcttcctcgggtggaatagtgccagagaccggcttctcatcattccatttaccgataacttcggcaatcttgccggcaatgacgtggtcttcagcgctaatctttgcacgcaaggcttcggtttgctcgttgacaattttgctcttgcggctaagcagctcgttaagggctgcccattcaccatcaacattctcaacgtgaagccagtcatacgggaactggtaacgttggcgggcgagtgtggtttggccttgacggaagaggtcaacctcgggctcccagactcgagtcttccgcttgcactgctgaacaatggtaatgaaagacacggcatgcgccgttgaagaggcctctagggtttggccttccaagtcccttcgggcagcagcaatctcggaatgaacctctctcatgcggccgccaagcttagaaccaaacttcacgaggatctcatgctgccactggtcgtatttggcattcaccttggtttggacttgctcgtaatcaatcctgatatttccgaagccgcggctgacttcagaagtatcgaatgtagcccgactctttctaatttcctgaagaagctgaagccattgagacagatcatctcccaggatttcgtaaacctgctcagaccgaagatcccaaagtgattggaactgcagccacttatcgacatactcagaaacatccttcagtctggactcgacaacattgtagacttcattgagctgatcggtgcaattttgcgggaggtcggagaagcagacttcggacaggcgaacattttgcacgacaatggagatctgataacgcgagggcttgatcttttccagattgcaaatcacaccgagccatgcatcaaagtgggagaaccagcttgcgcgtgcaaattgtaacggcgggtccagatggaggacttggtttctcatcagaatctcgtggaagagttccgggaactggatcttgtaattcaaagcatccgcttcggccgtcgcaagttgatgatgagaagtcgagttttcgttgttgataccttggaaggtcataatccactcgcgcacagcgcgaataagtcggtcgcgcagaattgcctcgatgcttccattaagctcagcaacccagtatccaaggttcacgtaattttcgaggttaagcttatcaacagcaacttggatgctgtccaagcgttgcttgaaagctgatgagtcgtatgggcatgtcttgagttcatggatcgatttctgaatgttctcattgatggcgtcaagaacgctagttttcgtctgaagtgtcgatgctgaaacggcaaactcacggacaaattgaacatgcttgctttcagaccgaccaggcaacgatgcctccatgccatttgccaatgctgactgcttgacgtgtagctcgtaagaatggacgaaggattcccaccggagagggatacccttggcaaccataatctgtgcatcgttcatgtagccgttgagcagcatattgacatcggtcatcgacgcgattgctcgattggtctgcaacagggtgcgaacactctccatcaggctaatggcgtaggggtaaacacgcttagcctccttcgagatattgctgacagcatgaggaacttggaagttgagccagataagattgcggacctccttgaagagggcaattatctgagcatcgaagttgactgccagctcccaaacgtttcctgcagatcggttgcgcacaacattaaacaaccgtccagcaattgtaaaatgacgccgttgaacatcccacagccatgactcgaaaacaggccgggtatcgagcttcttacggaacaggttaccctcattctgtaatttctggccctctgcgtgtaggtgccagttctcaccgagaacattctcgacctttcgcatgtagccatcaagctgatgctcgatctggcgagtccaaataatggcgcccgacacggggggcaggtcccgcagttgggccatagcatgagcttccgaattaccgtactgttgtttgaagcgctcatgcaaagcactgatgtctcgcttgacattgtcaataagttgcgtttgatattcgccaattgcaccacgaatcttaggacgaacgagaagggcgttgaacttcgagaacacacggaacatctcattggcattcctggcggtcgccagacggtcacgaaggcgagcaatgatagagttctcaacacgggaagtacgctcactgtaggcaatttcagcctgttcccaggtgagagatccctccggtgagacatccaaaacgtccacgttcttgagagcagcgtaggcgtgcgcaacttcctctacggcatcaacatcaccaatctcctcgactatcacagcgccgtcagcatcaactccagctccattctcggcagatgaagagctgttgggacctagaacgttgataatggttttctggagctgttcatggttgatcctgaatgtgtcgacgtacttcagccgctcgcgggttttgtcgtgtctcgcattgatcttaataggaataaatttttcgttacgacgccgtgttgattcgcgagcaacgtttgtgaattccttcaagttctcatcccaagtgcgccaaatcgcttgtgtggtcttcatcaaagaccggaactcgcgatagtccagatgcaagatcgtacgtccattgatcagctcatggatcttcttatcaagatcgcccgagattgcttcaacgagcgaaagtgcccgcttaatggggtaggggcaaatctttagctttttattcaggtgagtgaaaatcaagtttagtgattcctggaccttctgcaaagaggtcgcagacaggagttcatcgagaggaaagtctcgcatcagctggttgtacttctggaccaattcagtggcctctttcagcccagtgtctgccacgaaactgagggttggttggtatcgtttcgcatggcgaagaatgtccatagtcaaccgaacaccatcgctttggagctgagcttcgattccctccaaggcagcctctaaggacagccagaagttgacctcaggagaagcagattcgctgtcgggatcacgggacatcttagtgattgtctgaatggatctaatccaaccgttcacgacattctgaatgctgtttgtgaaagcgctgctctccaataccgccgatggaatcaactcgaccgatggtttgataccacgtgtttccgcttccttaagagcagcctgcaccatttcatgaagaggcaggttcagagctggaatttctacattctgctggaggtgcatcaaccctagctccaaatctgcgaatctcttctttgttcctgggataccagtcttcgcttccgtatccgttttcgatttcgtgccgatagctgtctcctggctgcgagtgtaggattcgaagtaaggactcagaccatggtgtatcatcaaatgtaggatttggtagggtgacatggaattcccctgctgggcggtggtattgctgagagtagcggggccggggagattcatgacttggacttgcgacgctatcggaagactcatgtcgattggaacaggccgttttatgatcgccacggaggatacggttgtaggagcggacgagatatcggaggagagattgtaggcatatttcaccgctgtatcttcgcggcataattagcagcatatttttgaatgcctatgcacttgggtttgacataccttggtcctccgtttcactgtcggtttcctccactgtcacaatgtccttttgcacatagagtgcaacttgcgattctgaggcaaatcgtgtacaccgttgtagtgtttcattgtactttgattccgaaagcaagctcccagcgctttccagctcgaacctttgggctcccagtgtcacctgaagcacttcggtcaagtactgaatgaccgcgccggaatcaaccagagctgcggtctctggtgctgaggcgccatttggcacacctgatgaggcgacctccatgatgccgagattattatgacaaattcaaagtgttcatcggtggtaaggaataataggagcgcggatcgggtgggtgtttgggatgttgagatcgcgtcaagcgggttgggccgaaaaacacagagcaaaaggataatgacaaaggctggaaagaaagctaaaatctaatcgattaaaaatggttgcaaagataaattccaggcctatgccgtcctgggtcttatgtctgttgcagatcaaaaagatacgcggcgtgtttgctttacttcaggggatgaacactattccccattaggttaagcgtgacacgacccccatgtgacaccgcacatccatggctctcgtccctatcccgttcctttcgaagtataagattcaccttaatattgacgggtacattatcgggttactaggtaatggaatttgaatctcataatttgcaaatggtactaaaatgaaacaaagaacaaatttcgcccaatctgtctgtcctccacaacttctctccttttcaaattgccgttccgatacttgcgcggtccacggtggcttgtccaccttgacaagcacagtgatatttctctcggaactcggaaagagacattccatcaataacagccaatgcccgggtactagccctcactttagcataccgactagaagatgcgactgcgctggcaatggattggccgtgcaccataaccgcagcaaagaccctgggggtctccccttccacggcagggacctctgcagatttcaagcagtaatcggtgcattggtagctgtgagtcatttggctatgaaggaatgtctatgacctattagcataaagcatataatctcaggggcaggagatggtcttaccgttggatgtctgtttgcaaatgtgtcgtaaatagacatgtcgtggaaaaatggtaggatatgcatgttgaagaaggcttcaataactgtgaagtcgaagccagagtcaacaaatatagcacccagataagcctcaagcatgtcgggaagacactgtaattcgtgagcatgtggattgtgtccatgtcaaataaggaacttacctttggggaatctgacgtcgaaagccagtagtcgacctctccgttgccttcgctctctgcaagctgaatttcctctgcgtatttgttgttttggatcatgagaggattgctgaaatgctgaagatgaacatgaagccccagttttacagccaaagcaccaagaaatttgttggataccatagccatctattcatgttagtcggcacttgcttgtggcttgacattgtgaaaaaaaaaatttacggaccttgtgttcagtcaaccactgcggatctcggttggggaaccgatgaaacaagtgctccacgcacaccatatccaggagtgcatcacccaagaactcgagcctctgataacaaggcaccttagcccatgccaatggataagatggatgcgtgaaagccgaccgcaggagacgagggtacttgaactcgtagcctactttctcgaagatttgctgggccaggttcttttcaaatccatccgctgccctgttctgatacaaaggcatggaatatgctgagaggtagtcttcccatgaggttgccgtgtggttatgactgttgacgaagacggtgacagctttgatagccatatcataccgattgtcatcacctcccgagagcaacgatgctcctatcaatgcctcgcagacatctgctatagtcttctcagccaaggagtgcttaccttcactggcaaaaaacttggcgtggtcccgaccatactcgagcgaaagacctggggggtaccacatatgtctgtgattaagtgtcagtaaaacacacaattgttgggacaaaatgtaaagaacataccgagagaacccacggctacgtatgtactcatagagtttcagttcaattgcgtttctgaacaggttcttgttgcagatgagacacattctgttaacgtggtagtcgtattcatcatcctccggattttgaataaagagcgaaatggatgttgccatcttgagcacagagtcccctagtagttcaaggcgctcgtaatttttccccattcctcgttgaacgtgaatctgtaggctccgatgctcttcggtgttgtctgaatccttggtgaaggcctccagggcatactcgagcttaatgccaccaagacctagcatattgcatccctcctgggcgatcaggtaggattccattcgcgtgataattgctggaaagacaaaacacgtcgcggccacagacgtggaaatctgagttacatgttagcatattggataaactgaaacgtatactggtgaagaactaaccgccgatatagccaagggctgagggcaaatgacacatctcgagttggatgctttctcttcctcggccgctttatcaaggaagttccgccgaaggcagatcaactccgcctggaagaccggttgggtccagatacatcggttgaagaatttgggacgtgaatttttgctcaaactcaaggaccaattcatgatattgtctgaccattttcgagatggtgcgtaggatgggggtgggtctgaaggacgtagattggggtctatagcaagcgggaagtatcgatactttccattccaatcgtcgtagatgaatcgagtcagcaacgattctggctccatgtcagaagaccacataagcttggggttatctcggacatattgtaaagcctcccagtcaattatgtcaaagatacttgttgacgttccaatgtcgacatcttctcgagcaggcgcaagccagtatggaaactgttccgagacgtgcttataggtcttgtgaaacacgtcatgaaagacagcaagtgtaaatacagtcagatattcgagatctttggaagcaacctcgaggccgtcgtcaatacacaaagactgaactgtagtctcgatatccttatccaagaagaccgggaaagtcggaattgtagtgattcgctctcgtgtaagcaatacaatacttccatgagctcgagccagaggctttgatggaatgagacgaataactatcgcgtagaggcgtgtgggaacggttccctgcagcctagcccagattgagggcttagtacgcattcggtactgatcagtcctctttgaagtaatagccagtttggcattgcgcattgctggcaagcgcttgtggtagatagagttgaagtgctcatccaacagattcttttggcgaagcagcatacacgcatcaaaagcagcggactgcttggcgagtgatttcttcgattcggaacgtccaatcactcttcgcacaggcgacttctccggcataattatctcacagctgaatgattcgttctctgacatcacaatgtatgtgaccgatgctgatatctcattttcgtattgctagaatttggtcagcgttagctttgatgaaagccatcagaggcaaactgattcttaccaatgagctggcaaatcgtgccaatacaccaatcgcatggcgacaggttaacatggcacctgtgttcgggatggtgtatgttctcttcctatcttcctcgtgaataagccctttcgtatcgtgatcggctccgtacaattttcgatcctccggcagcagattgcagaaattcttcatgaggtgctgtttatgtcagttagttcagtgctctattacctgcgaagcacccttacctctgctcttcgaacttcctgtagtctcatgctgtggttgtgattgccactttcgaccatagttgcgtactgcagagtagtgagtaaatcagttgcgtctcataaaggggaaggaaatctaaccactgaatcagcgcttctggcacggcctcggctttggacatattgaattaccgtgtcaaacagatcgaatctttgctagtcagtaaaagtaacagttgtgattagaatggtgaatgacataccttaccaccagattacaatctgggatgtcaaggccttcctctgcgaccgatgttgcaaactggaaatgattagactttctctataagttgttttttcgggtcgtgtaaaagctcaccaagcagttgacttcactttttcggaacttgaccaagacaagaaactgccgacgaaacgtggaattcattcctagagcatctcctttgcgaacaccaaccaaagcatcgggacggaggtttgggagttgcagcttttcgcacagctgtaacattattttagctgtattgcgccgttgtgtgaacacaatgcatttggtatctggcgacttcgcaaactgttcttgcaactttctcattaaaagctctactttggagctgagatcagccggcgtaaatgcctggttttcaatgtattccttgacgagctggttggcttcttggatccgcttaatgtcctctgaggccttttcagaatcctggggatcagaatcggtgactttgccgatactaccctccagcttgggcagcacttcgtcagccagggccaaggcccatacctggtctgcgcaccaagcccctaattccgagcttgcaaccgatgcaaatcgaaatgcgccctctagtattggcatatcaccatacttgactttcaaagtaccatgtagattggtctcaaacggcggaggaagcttgtcgtagacccattcctcttccattggcttgttcacgaaattccgcaggagggtaagatctgaggttgttgcaatgcgactatctaaaagagtctcaagttggctatatacagtcagcaaaagcttccaatttcggttagttagggtgctcacattgctgcttccgctatgtcacacttagcatcaaccggggaagcggtcatcccgaagatccttgggcgcttttcaggatccgctttcagatagctgtctcggatgatactaataaatgtcagctcttgtcatcatgttacaattgaaaaatgggctgcataccgagcatacggatgctccttcttggcatggtgagcttcgtcgaagatcagaagattgatctggtcaattcttatatggccattcagtagagattggtttagaatctccgccgtgcatacaatcaccatgtacttttcaagatgcttgttccacgtctgttggtcccaaagatcgggtcccagattgccataaaaatgagcgactctttgatcgagattgtttctcaataccgcagactgttgaaaaaccaaagtcacactgtcgaccaggaaaaaggcaacgcgaggacttgcgccatttgcacgtttgttgagttcgatttggagaatatgcttgagcaaaagcacggccactaaagtcttcccagaccctgtgtcgagaaccgcgatcgtgttgctagcccgtgctctttcaaagagctcgatttggtattcgcgaggatctagaactccacctccgggctctgtattcgcgagcaaacgagcagttgaaagttccgcatcagatagttcgatatgtgatgcattgggaccgtctttaggcccgttgacgacatggtcttcaagccttccgaactgtcagcattggtcttcaagctaagatatatcaagaacttacagcgcattaaacatagcattttgagttctgtgtcggtgcgacaccttcaattgtggggtcgcagcttcgtcgccagatagatctgagctagtatcttcagcctccatcttagctgtcttaccctgtgctagactatgttgaagaagaaatgctgaagaagaggaagaggaagaataaataaagctacggaagtgactcaaacctgggcaagagaggaaaccgtattttacttagcaagcgccgacgacataatacgtttttgtaccccgtcctacttagacatgaatttctcataagtgaagtgagaatgatagatcgcaatgtttgtaggtgcattgagaaggctttcaagaatggctccatgtgcttaacaaaagtccatcaatgactgccttaagtcttttttttgatattccaatgatattgcatttttcttatcattagaaaattgacggcatttacacttatacaataaattacatgttcctatgctctgtcgtcctatatatatccattcatgcatccaggcatgacatccgatgagaatataaactaggactgaaggtgcctgtgcacatgctaaaatgagtataataagagaattgagccatcaatgattgaaaagtaacgactatctatagagagactaaaatgaaggagagccctagaggagaataagagtggaatgaacacatatcaacacaaacccgccactcagtatacagaaaaaacatacatcgactcatataagagtagaagcctttggactaagcgtatagtcttgataccaaccttggaacaagtatagaactcaaaaaattgaggatcgaagtatgagcttctttatcaaacgcttatcggataaaagcttggccttatcgccttatcgtatttccaaaactcagatcgagatcgcgggggacatgtgagcccctactaagcacctctcataacctatctccgacctaatataagcccgcaaggccaatatctgaaccaatggaagaaccgcagagtcttcgctctctatttgcatcagcaaaagagcaaaaagatgcattgggatcgcggggtgacaccaacgctgagacctaccgagacgaggtgaatgcgacgatagccaaattccaagaatgccagcgtcaagtgagcatgctgtccttgtttagttctaatgagttgttggaagatatttcgaccggtgatctccagtacgccaccttgattccggcattgcgttgcccattcggctgatttgttgtccaggtacatgacactggaatttcatctagctgagctcttgcagcgagtttctgactcagatcgtgaagccgtcctcaagcgtgcgctcgaagaatatgagaaatacctgatgcgtttggatgagtacctgctactctctggcggggataagaagctctttgagcaatacatggccaatccgacctcttttaccctggcgccagctaacgacgctgccgccagacgggaaattaaagtgacacggtttcgggaagaaaaagaactaaagcagaaactggaggtatgcgggatcctttgctggatattgtttggcgttcttgcttaccccatctaaagtatttcggacgcaacgaagctcgactgcaaagcgacgacgatgacacccgatccctctatctagcggagcttcagctttacacccaccagaccttccaggcattagatctcctgatccaagaattgtcgatactttcaggtatgcgcaatgcgccgcctcgccctccaccgacggacgatcccagacagcgaagcaatattggaggtttgaattactcagagaagctagatccttcagtgtcacagctcttgaagggaggcagaggcggtcctatcctgaacagcaaaggaaagccaatgcagccgttcacgttgttgggtcggcgctcagaaatgcaacaaggagtctttcgttcgggccataaccttcctaccatgacaattgatgaatatctcgaggaagaacacagacgaggaaatgtcatcgaaggaggaggcgagaagtctggcatcaaaccgcaagttgacgaggatgatcacaacattgccgaccaggaaacgatgaaggcacgaaattgggacgagtacacggaagctaatccgaagggtgctggaaacacactgaaccggggataatgtaaaataaccgtcatgaacagagctgctttactatgtccaaacagccacgatagacagggttcttggtgaatatccttgatatattgagcgagtacgggtatactagacaagaaaactcgttcacttcattttcaacagggtatatctgcctagttacagtaaaagttgacctgaacattcagactgcagtggaaacagtctccttggccttgttctgttggatagcctcgagaatgtctccagcgccgtcggcgaccagagccttggctacggtgacgccgaaggcctcagcactttcagcagaggtgacgtcggcttccaattctacctgagcacattctttgccatcgacactgacgaccacagaccgcattcgcaactgcttggcaccctgcgcattttggacccattcggtttcaacgcctaggggggcactgcagcctccctcaagagtccgcaaaagactgcgctcagccaagaccgagaatgtggtatcttgatcaccaatcgtgtccaacatattctgcaaaacagcgtcttccttgcgaatttcgatgccaagggcaccctgtccgacagcatagagcatgccgctgttcttggagtccaaatattgggtgatacgatccgtcaaatcaagacgcagcagaccagcagcggcaagaatgacacatgtgtacgggctatcttcagcatctagctttgataggcgagtgccgatgttaccacggacatcctggactttcaggtgggggtatttctgggccaactgtgctgtgcggcggatggacgaggttccaactacggacccggcggggatctcggaaagacttttgtatggcaacccttgtttcaccacaagtacatccctgctatcttcgcggggcatagtcgggcctagcttgcaggaagaggggagagtagtggggacatctgataagattgcataagtcgtcgtcagctcttttttagggtagaaacagctactctgtgtgagattgggatattatcagacctttcagcgagtggacgataagatcgacctgtccgttgatcatcaattcctccaattcctccgtccacaggttcttggtggtgaaatcccgtagtgcgatagtggtgttcaggtcaccggttgtctccttggagaataccttatattcatattgcgggaatgctttcttcaatgcctcgaggactaaatctgtctggagcagagccagtttagatttgcgggtgccgatggtaaaggtctttttggtgggggcgggggtagtcattttgaggcggaaagaaagcgtatgcagagaatgggcttagagagtatgcgagtagatgtacggggttgtatgagctatgcccgcaagataccagatcgccgaggaaagtcaggcgaagaggcgaagtgggtttggagaactccgatcacgggacacatgcagatcacctgaacagagattacgacgttgggcacatacaataatctgggaaataggaataaatatataagaatagtagactcatagttattacaatgcatgtagatctatcagattagatataaaccgtcaacggcaaatcccttaattcttccccggttgatcatcaacctcggctacagggcgtggagattgcgaggcatgcgacttatctcccccggacttcccatctcatctacgtgcttctggaacctccccggccatctctcctctacatataattcattcacatccccttcatcccttgtcccatcactgattcctcattctccatacaatttacacttacaccttcatacttcatattcccggattcctatctttgccaccctattccatcatcactagggcccgcacaagatgggatccaacggtagaactactaagattccccttgtacctcttcccaagggctcggtcctgctcccgggcgtgactctacgcattccagtctccaaccgtcccgatctcgccaatcttctgtcgtcactagtggacaagccttcgaagcgagatgcgaatactatcaccttcggatgtgttccactcaactcaccttttttgagccgggatggacagcagctcctcgaaggcgacgactcggattcagagcgaaaggagcaatatgactcaattgacgccggtcaggcacggaaagaggacttgttccgatgcggaactgttggcaaagtcatcggagttcagcgccgggcctactcggagccatttttacttgtccaaggttggcaaagattctctattaagaaggtcctacgagaccgcccatactttgaggctgaggtcttcattcatgacgaatcaagttagtttccacagacacaaaggacaaagaccacatggctaatcatacttcctatacttctagactctggccaaggcgatgcggaagtcgctgtgctattccaacaattgagacagctctctcgagagcttcttactctcttacgtctctcctcattgctgtcggcagcctcctctcgtctctcgccactcgttgcccgaaaattcgagctctatatatcaaagacagaattgacacaagcggggaagctggcggatttcatggcggatgtatctgacgcaagctttgaggaaaagctacgtatcctcggctcgctgaatgtcaaggaacgcttggagagggttgttgagatcctcaccagacaggcacagcatattaagagtagtgtcagggtcacctcgattggctcgacctcgttcccctcctccgccatggatatcagtcatattgacccccgtgatcgcgagttgctcgctaagcgtgcaatttcgggcctctcaggcatgacacctcctggtgggcggggcaacgacgaagagaaggaacccaatgaagtagatgagctacagcagaagctgaatgatgcgcagcttagtcccgaagctcagaaagttgcggacaaggaattgaaacgcctgcgaaagatgaaccctgccaatgccgagtacggtgtttgccggacttatctggaaaacttgtcagaaatcccatggaccaaagcgacagaggaccaacttggaccggacacattgaagaacgccaggaagcagctggatgaggaccactacggcctggagcgaatcaagaagcgactgctggagtatttggccgtgttgcgcctgaagcagtccaccaactcggatgttgaacgccagatctcaggactttccagggacttggacgcctcggcagctggagatgtcgatcatgatgtccccctgctgtcagagtctgaccggattgcattggagacccgccttgagatcctcaagtccaagcgtatgaccgacaagtcccctatcttgcttctggtcggaccccctggaactggaaagacaagtttagccaagtctgttgctgcttcgcttggccggaaattccaccggatctcccttggtggtgtcagagacgaggcggaaatccggggccatcggcgcacatatgttgcagctatgcctggtttgattgtgaatggtttgaagaaggtcggtgtttcaaacccggtcattctactggatgagattgacaaggtcggcggcgccaacttccaaggagacccggccgctgccatgctggaggttcttgatcctgaacagaatcataccttcaccgatcactatatcaatatccctatcgacctgagcaaggttcttttccttgctactgccaactccctggacacgatcccggcacctctgcttgaccgcatggagaccatctccctgtcaggatacaccaccgttgagaagcggcacattgccaagcaacacctgattccgaagcagattagatctaatggtctcaacgaggaccaagtaaatctgtcggacgaagtgattgataaaaccatcacctcatatacccgtgagtcaggtgttcgcaacctagagcgggaacttggctctatatgtcgccataaggccgtccaatttgccgacgccggggatgccgatcgcctagccgattataaccctgttgtatctgtcgacgatctggaggatatcctcgggatcgagagatttgaggaggagatcaccgagaagcacggtcgtcccggtgttgtcacaggccttgtcgcctactctactggtggccagggtagcatcctgttcatcgaggtggcagatatgcccggcaacggacgcgtccagctgaccggtaagctgggcgacgtgctcaaggaatctgtcgaagtagccctgacgtgggtgaaggcacactccttcgagctcggtctgactcacgaccccagtgaagatataatgaagagccgtagcctgcacgtccactgcccctccggcgctatccccaaggatggaccttcggctggtcttgcccacactgttgccttggtttccttgtttagcaacaaacctgtcccaccgcagatcgccatgaccggcgaggtttctctccgcggccgggttatgcccgtcggcggtatcaaagagaagctgattggtgctctgcgtgcgggcgtcaagaccgtgctgctgccggaccacaatcggaaagacgtcaaagatgtcccacaggaagtcaaggatggtctggaaatcatctatgtcaagtatgtcatcccttcctaaccttggtttaataactgctaacaattgtttcacagacacatctgggaaggattgcgccatgtctggcccgatgcgcagtggccaggccagcaccagatgaactttgttgagagccgactgtaaaccgttctcaacactataagttcaaggggctttgcctctcgcggtccccccacctaccctcatttttgcatagcgtataatagccagaggcaccattgacttgtatttaatcagattgtcttccgtgatgcgttcatgccagtcaatatttcgtgtctatatcactcaacataccgggttcagttctaacactaacaccacaactcacaattcacgaaatctattctatcataaaattcatgtaaaccttgactagattagatcagaaaagatgatacgccatattcaagatgtatacaatctaccccaagagtataatacacggatccagccaaacatggaccagaagatagagcaagaaacaccaattttccccaatggaggggatggaaaaaagtcatgaagaacaatgcaaggaatctcatcaaaacagaaaccgattaccgcgctccgtgcttccgctgcttagcataccaagccggcaacgtagcagcagggacgaaccctccattcttagccgcctggtgtggctccaagcccagagccttccaggtcggtctccaagtctccttcttctcgagcagcgccttggcctgctccttataggcttggcgcaactcttcatcgggcttttcacccttgttcggcttgggattctccttttcttgtaggtcgatctggaacttctcggcctttctccagccttcattctcccatctattggtggaaattgattagttaaaatgtcccgtctggttggaggtgcatgtgtagtattgggaatgtagagacggaagacaacggaattgaacttgaacaagacgacaacgataagtatgggtggcacatactcagtcagatccttcggctcctgggggtacacgaagggctccttcaattcaacggtcatgcgcttctgtgacttaggtcggcgccacgggccgaagcccttgttgtcacgcgagattcgtgtaattggctgtgcctggacataactgcggatgctgagggttccgactccgtacaagtgccataggtagctgcggagatcgaacttgttgaagttgagggggacgcggaattgagcatatcggggggtgaggttgggggtgcggactaaagcgacgcggaattcaggcctaatgaggcgaagaattagctgtagtgcttttggtgtttatggcaaatatccaattgagccggtcgagtttgttgagatgctgtttgggtcgacccgaattgaggttcttggaaattttgggcaacgtacatatacacgggcttgccgatgacgctgggccatttgttttttggggttggttggaccccagcctggttttgtaggcggcgcagggctttcgcctgaacactgctgagacgcaccatcgtgttgttgagtggaggaatctgggggttggaggtgcttgcggatcgcgaatcaaaactgcgttggccgatatgatcacatgacttccatgtatacgccaatagtgaacgacgcaacactcgttggacattcaagtcaggagtcagaattgattacaatgcatttttggtatagtatgaagtatgttgttaatatttcctttagaaatgaagagtttggttttctgtaagttctcccttgataagaaattttgaaaacctatattacatgctttattcatcgtaaatagtcattaaaaaggcccaggatcttttcttttactgctccgccgaccccgagactcggagttcttcgagtcgcttggtgctgtcatcgatgtcttcggagttcttggtctcgtgggcatcactggcctcttcggcttcagatccagactcttcctcatcatcctcatcctcatcctcatcctcatcctcatcgtcgtcgtcgtcgctaccattagcctccccatctcctttgactcccacctctaccatataagcctcgagctcacgggccatcttgcgtgagaagcccgaggcttcaacttcgacatccagacgcttcccaggatttttgaggagcttctttctagcctcggcgaaagtggggccctttgagtcgctcacgaagtggaacttgcgcttgaagtaccgcttgatacattccacatcacggtcgaaatacatttcagcgttaacgtggtcgacagacaacatctgcgggaaatcaatgagaaccgggaccagccggatatgctcatcttcctcttcctcagtaagttctttccccttcatttcggggtctaactcttccttgataaggatattgaactcattgaaatcaccatggataagaccatatcgggcaagatccaagatgatattcataagttcggagtatagcccagcggggtcagcgacttttgagatttggcgcagagggaaagcatcaattagactcatgacgatggtgtgtcggttctgggcgatggggtcggggacagagaatccgttctcgtgcagagccttcatgaaagcgaactccttcattgctgccaatcgagacatgtacatccatgaggctgagctgcggtgtcgtaggtagtcacggttcgtcttgactgttctgaacgagatacgaccgagacggtggattttcataatacgttgcgctccggtgctttctgccaccacgatgatgtctgattccttccccacgccgatttggttgccgaccgaatagatgaccttcgacttttgatgcgcgtgcagcgcaaggtaatccaatcctccgtatgcgagtcggtagccgtcatctataagcagaatacatatatcagtgataagatcagatgcaaaagtaaagggaatgcatacatttggcattcttgacctttgcaatcagattgattttcgcgaggtttgagattgcacgattgacaccgctgccgccccggaggcccgaaagttgcgcgatcaatggcgttggaacgacctcatgattccggctgccagcttcacactaggaataatttacatgttagctaatgattcgcgacagaatatccccaaaggaagaacatcgcggggtaaacccaaggggaggccgataagtaccgctgctagaactcggaaatcttcggaggtgaggtagcgaatagccttagcatcgagtttcatgattgtgaggaaatgaaggagcttttcactttcttccgatttccataaattgattcgctggaggccagaacttcaagaccagtcaacgatgcggcggaggaaaaaagttgataagaacctagccctatgccctatttcctatccgggatgagaaccttgatagctctcgcgttcattggagaaaaatatgcgacaattacaaggtcttgactggatatcttcgaatgtagatgaaagtcaaggggctagtcgaaaatacgtagtctactcatagatgcgagcagttgaacatatataaaaaattgtgagataaatccatgctattcttcattcgttctgaatacattagatccaacgataacccgaccactatacgagtcccgctggttgcgagcaatggatgtaaatcggggaatatctagtctagcttgcttattcggggttttcgtagtccgggttctggaagataggttagtactggtatgtctgacttgagataagggcacttactttacgcaagataaccaagccttcgagagtgctgctcagagggatgtactgctcatcctcaagctcagctctctcaccgtgtgccagcaggactggtgtgctctgagtctgccatccagtgatggtctttgggcgacccgcctggccgaccacgtccacagcctgaccgacgcggacattgacggtgagtggctgaaggtcctcatcgagggtaataaggaagcgggggaacatggcggtgatgaggaagtatagcaggtagtgatgttcagcgaggatgaattgcttggcatcgatgagtgatacaagcacagtaagcaagcccgctgctgagacacgggaaaggacctgtcggtcggtgtggaagggattgagcgtcatggtacccttgcccatgtgtagaagaccctgtgcgatgcgaaccatgaatagtgagttctggtcgcggtggtagtagctggccaattgccggagaagctgtgcgatacgggcattgttggtaccagcgccacagagacccatggcgaagatggcattaatggcaacatcgttgtcattgtcgtgactataccgggacagtgtgtcgtaaaccttcatttgtgggttgctggggctgatcaagcccatagccaggggaacagcccggcgaatattgctagatccgtagtgcatgaggtgaccgaattggcggagaatcatatcctgtccgacatcctcacccatcgcaatgagagacaggccgagaacagcatacgactggactagctcatcacccttgttctcctccttttcttcaatgatgtcattgcagatgtggagaagctcttgtagcttgagcaccgttccagtgcctgcccaagcgcatactgaggcaaggactgaagtgggcttagccatggggtgatcaactgccttgagaatgtcaaggatgacatcaacctcctcttgacggccaaagtacagaagtgccagaccaagggccatgaaccttgtccacttgtccttgagctgcttctgacgttcctcatccatcaaagtcgtcgcaattgcctcgctaacctggtggttggatgaaccaacaaagatgagacccagtgaaactgctgccatggcagacagttgcatgtctagtgaggcgtcctccacaatgggaaggaggacctcaagcagttcttccttgttggatccggcatatgctaaaccaagacccatgatggatgcaactctcatcggcacgctcttcgcctcaaggttgtcgggatcactcaagagggcaagggcggggtcggaatcaagtcgaacgccggagttcaggataccaatagcgagcagtgcaccagccttaacctggtcttcttgcgcgtaggtgaacttgtcgatcttatccaacccatcctcgacatcacggtgtagcagcatacccagtgacgcagttgtggaaagcatgccatcatccttggtcttccacacccacgggcccttatcaccctccactagcatcatcttatcattaccaaagccggcgttaacaaacgagttgacaaaggcgctggccaagttgtgtcgtgccgagtcaagattggtgagcccggctccgcgactgctctcgagatgtgtcttgtagatatcctccggcattttggggtccagaatattgagttccttggccagggatttgaagtgcttcggaatagaagtgttattgagacaatcagccaaggcctctccctcctcatcttcggctgggaggtcgagccagatctgctgccgagcgacaaggaatgccatctgtttcttcaacgatttgtcagtcgtggcatggatgtcgctcttaataagatcaatgtcattcaaacggatagcgagcacgattgcttgcgaaagtttgttgtagcggacgtagatcccgtgggcggttcgaaggaattgctgatcttcagggtaagtgagtagattgaccatgctgaccatatacaagcagactcgagcgtatgtgttctcgtcaacgaattgagggatatcttcgatgatttccagttcgctcatgagatcaactgcatcagcttcagcgttatgactcaggaaatagggcaccagcgacaacgcaaggtccactagatcctgggtatcctggtctgcgttcaaccggttctgatactcctgtccgagttccagcgcgagatgtcggacatactcgtggccccaggagccaagatcctccgacttggccaacaggcggtatttgatggtatccagcttctcttcgtctccgcaggtcattccaagcaccgacagcatgtcagctagcgagttctagaaaaaaggatactgttagtttgtcacaaagcgatggaagcgctgcagaaccaacctgcacagggccgggggcccatttctcgtagagcgctgtcaggtcatcataatgcggtcggaggaacttgagaggcttaggaacagctgtcatggaggatgtagaagttttgataaagttcttgattgcgtccaaagcaggcccatagagcgaggtatcgggttcctatgagcaaaaaaaatgattaacgtcattgtgctatgcgcacgggacaggatagtaactgtacctttaaccgctcaacgagcatctcaagctcgcttttcaattgttgatcttcttcactgagttcctctgtgtgtagttttcgtcagcatgttgctttgagtgccaccgtggacccttgagagagaccacatgctccgttgcgagaacttggaaatgccttatcgcaacgtaccatctttagatgcctcatctttcttcttttcgtctgctggcttttcgccattttcggtgttcttgccgctcaactcgcgaacatcatcaaccttgcccttgcccttgtcggcggaggttggccgttcgccctcgttggccatttctgatggtagctggggaccaagtcggggggaaactgaaccggcgtgggagaagtaggtatcaagcaggtgagcagaagatggtgttacaaagcagagatagatgaaattctgcaagtaaagagtgatgcaagtggattgtaagctggtgatggagaagcagagctcggtctggtgcagctccgtaattagattacataatgtgccaagccctgcggaaggccctcgtcattgttttggatttacgatggctacgacttcaattctatgactcgaatccttatgactctgatttatgagggagaggatgacttaggggtattttaatatcggcttcaatttttacacccctttgtcgtacatcggaaagtgctatgtgcggtttatgcattttaccatgcttgtacacatctaaaagacatcccagaacacatgtaacgccgctaatatcattttagaccaactagataagattattaaattccacatcctcgaggatataggcctcatgagcggccgactcttcttgttatcctgagtttggtaaacgtgccggtgaaattctgattcagatcctagagatttcgctgggaattcattcttatatgcaaaataataggtctgtcgagacgtcatcaatcttgctatctctggggcatcctccgtaaagagttcggaactgcttggcatattcttccgtctgtttggtgtatgccgcagccgttgagccctctccgttgtatgaaagcagaggcaaagcatcaagatcgggaagacccgaagaaaacaagtcgagaagtggcattatagttgatgcacggttcagtggtttttcaatggagcctaagccggcgagagagccccctgtaagcggctgagcaggatcgtgaatgtcttgagtagcttcttcatccgaggttgcgggactgttgtccgcaaattcttctgggggctgatatagctcgttgtgtactgtagcaatcgaagaagattttattcctgggaatgatggatataacaggtagtatcctttggcgcggatcatctcgagcatgtattccataaaggccggatatttctccgatataatctttggttgggaggccgctgtggattgcggagtcgacaggcggttagccatgaacgaatggaattccgcccatgcatcaccaaaatacaaagctgcattactattgggggcctgccagaggaacgagggaagaaactgttctttgccttcaacggtcatgggtggcggggtgaaagattgactatcgaccgtgggtttgaatgatggcagttcaagtgagatgccgatcatattggaaaaaaggcgcttggcgcgagaagactgtttgtaattcagtacagcaaacttcaggtagtggtagaacgatggtgcgagctcggtctgtggagatagcagaagcaaatgtgtcatctcaggatcccgcggatagaacgactccacggttcgaagcgatgattcttctgtgtccatgccatggggttgaatgcgccgccgaatagtgattcggccaggaagctgggtcagcccgtccaaatgttggagaaaccgaagcaactgtaaatctacccgctggggtagttctattgtcaagcttggagccgatcctaaatagtcggctgcatccaatgacttaataagcctgatcaaagacccagaagactcggaggctgcatgcaccaccatttcgatttgtatattattccacgctattgcaggtacggtcagcatttccggacatgacataccaaagaggaggaagataacctacatcgaagagcttggctatccagtgaagctatccacataagattccttgaatcagaggaaagagcaacgtgagggacgtcacgttctcgagaaaagacctcaaccccgtcccagaaaaaggaatcctcccagtcctgaccttgtgtaatgatgagctcggggctgatgtaggcttttatgttttgcaacccccctatcacagaccgcttcatacggtcatcggtagatttgggtgcatagtccggccgagcatctgtcagttgtcgccaagtcagcaacacgcgttcgaccatcaggatctgaatatcataccgtgccatgtcatcgggcattcactatctctgattctgttgacttccttgattccgtcaatcgagacttcctccttgcccatcaaggtgaaatgcacatagttcagccgctgactagccatccgacaagctaagggcaggagatctgacacactgcggagacttgaggctgcaaacaaaactgcacggctcgtggttttctgcgaatatttatagcgaggaagagagtgggccaactcatagaatttgatcatcccatcgtaagcttcctcctttcggtccgattccgacaccttgactggcggcaaattgtccagtagtgcattgcctggcttgggaacagcagctggattgcctgagccagcccatctggcaaggctttcttctcgtagcttcgcagccgcagagtcgtaccgatctgtgacaggtcctaggtctgtcggcatgtgcttgaagaactcgtagacgaggataagtgcaatgatagcaaacaatattcggcgaggtcggggcattgctcggtgccgcagaggtaggaagcgtgcttgatcggatggtcgatggtcgtcatctttcttgcccatctcttcatcagcctgaagaggcatttttgcgcggttcatgatttcggcccggaattattaagggaaagctccgtgagctccgtgggtttctttatgacatcgaagcaacggatagatgcagaggacaattgcgaccggagtgttgcatatccattgcgaaaggaagaatgtagcggagcaatggtatccaccagcaatgacgcctgggctctcttatcgccttatcgggtcttcgccttttctccaactacgcgcatttcgcaacctaacccccacagagcaccttcctgatagctggaaatcaggatggaagacgatatgaatattgagcctatcgatcaacgcggcaccaagcgcgccgcagaggaagatgagcctctggaaccccctaaaccaaagaaaatcaaggtacagtaacgcgtgcacatgaaaccaatcatacactatcacataccagaaatactaaattccgtacaggctttggatcccgatgtcgtaaataaaattgctgctggggagattatcgttgctccaatgcacgcactgaaggagctcatcgaaaacgccgtcgatgctggctccacctcgattgaagtcctaattaaggaagggggtctgaaactactccagattactgataatggccatggcattgatgtaagccatttttaagattatagcagccggctctaacattatctagcgagacgatctccctattctctgcgagagattcactacatctaagctcaaagaattcgaagatttgacctccattggaacatacggattccgcggtgaagctctagctagtatcagtcatatcgcacatctgacggttacaacgaagactgctggatccagctgcgcctggcgagcacattacggagatggcaaattgataccggcaaagccaggccagaattccgcacccaaggcaacggctggccgagggggaactcaaattaccgtaagttaaaccgatgaaaatatggcaactttcaagttaacggagcccaaggtcgaggatctcttctataacgttcccactcgacggagagcattccgctcggcaagcgaggaatatgctaaaatccttgatgtcgttggccggtacgcagtgcattgctccggagttgctttctcatgccgcaagcacggagactccggtgtgagcatatcaactccagtcagcgcaaatactgtcgaccggatccgccagatccacggcagtgccgtggcaaacgaacttgttgaattcaaaacagaggataccaagttcggatttcacgcatccggcttcgctaccaacgccaactatcatgtcaagaagacagtaattctgcttttcataaatcaccgcgcagtagagtcaaccgctgttaagcgtgcagttgaacagacttactctgcctttttgcccaaaggcggccatcctttcgtctatcttgatctcgaggtcgagcctagccgcgtcgacgtgaatgtacacccgacaaagcgggaagtaaatttcctaaatgaagacgagatcattgaacttgtttgcgctgaaatccgatccaagctggttgaggtagattcgagtcgcacgttcctgacacaaagtctcctacctggcgtgcagacaatcgagtcactacaacgcgatcgagacgctcaaactcacgagggaacagcagaggcaacaaaagccggagcgacgcccaaaacgcccgcaacggctaagagaccctacgaaaacaacctcataagaacagactcaaaagtccgcaaaatcacggcaatgctaggcccagccgcctcacctcgcgacccatccaacccagacgcacccacagaacccaacgacccaacgacatcaattctagacaacggcctccaatacgaaacaaccgatcgccaacccctaaagatcgccctctcatccgtcaagggtctccgagccgccgtccgctccgagatgcacaacacactaaccgagatgttcgcgtcacacacatacgtcggactagtggacgaacgacgccgactcgcagcaatccaatcaggcgtgaagctatacctaatcgactacggactcgcatgccacgaattcttctaccaagtaggcctaaccgacttcggcaacttcggcgtaatccgcctagacccagcgccgaagttggtagatctactgaaaatcgccgcagaatcagaacgccaagagcacccggacagcagcaaagcggacgaggccgattccatcttcgccaatgcaccggagatgatagcgcgcacgctcatcgaccgtcgcgaaatgctgaacgagtacttctcgctgcagatcagtcccgacggagacttgctttccatcccgctgttgctgaaggggtatctgcctgcgctggcgaaactgcctcgtttcctgctgaggcttgggccgtatgtggactgggacagtgaggagggttgtttccgtacatttttgcgtgagctggctgctttttacacgcctgagcagcttccggttctgtcgcggcctgttgcgcaggacgcgctgggggagtcggttacgcaggggccggtggtagccgatgactctgaggtcgaggatgaagatgcttttgttagggcgcgtcgtgcacagatggttcgcatgttggagtatgctattttcccggctctccgtgcgcggctggttgccacgtcacggctgctgcggggtgtggttgaggttgcagatctaaaggggctatatcgggtgtttgagcgctgttgagtaataagaggatgtcgtaatgtcatacagttgtattataccgaattatatttatgaataatgaatgaatatctgtctgcttttcggcgggggatctaaaggcctgcattggtgatcgttcatatacctcatacctattgtgcgttcgacttgatattcccgtaaatcctacaaggtatcttgaaccgaatcgagagatgtgaagcctgaatgagacgaataacattaaaatggtcagcagatacgcctgtgatcaccgaaattgtgaccacaccaaccctaaataacacataacccaaagcccatagaagggaccgagagaggagaaaaaaggcgagacaaaatgataaagacaagacgacgaagagataataattcaaatggatatgaaaatgtaataagtatgttttcgaaagttccagttcaaacgtgcagcgtagcatgaagacgtaacccctagacaaggtgaggtgtatcatgagaaaatgctggtagaatgatatgaaataccagtgcaaaacctggattgctggatgaaacagcaacaaaagaaagaaaaaaagtagaaagtagaaattggaggcagaaagataaaataggccgaaatcaagaggtaaaatcaacaagatgggccggctgagaagaaagaaaatatcgggtcgaacagagacagcagaaagattgcatggatggttgttgcaatatcatgccctaaggtcttcagaacgccgagcgccaaagatcaatcaaaaggtcgtctcatgttcgtagaaatcgtgcagagtcattgtatcgtagtgtgtagtatcccgaataggtgaggtgacaacacgcattaagggagtaggtttagtgtccgggtcatcgtaaagccgagtgttgaccctaagtagtcggtagagaagtcttgtgaaatgtttaagcgttcgcgtttgcagtaggaatggcaatctcgtatccagtatccagtaagccgccctcataatcctgattgtgtagactgggggtgggtcgaggctactcttagtgcctcgaataaggcttgttgagcagagctatctcacgtgcaacaatgtcccattcaagatctcgcttgacgggctggcctcgctttttcatttgatgctcttcccattgaaggagttcataactgcagggaaatgtgagcaatctttccttgttgaatgtgagggtagaaggacagatgcttacacaaagcgaagatgtggctggatgatgacgttgagtcgtcttgcgcggacaaagcagctgttatgaattagtatcggctcggccaaacgacttaattatagattacttactatgcacgggggaaagagagatgtttggacgccatgacttcagcgatgcaaatacttgcagatcgggaaacaccgacccgacaatgaaccaatgtggccgtgccgtggcgttttccttttcctgtacacagattagcaggttgaaacagaaacggaggagtcacaaattcggaggacttacctatgaagtccaaacaacgatcgtactcctgacagagaggatcaatgccattatcttggacattgtcaatgtacatcagattgtcagctccccatttggcgcggtccgaatctgtccagttgacagcctcgccaatactaagcacacgcttgattccaagctgccacagaagctccgggttgtttgcgtgattcagattgcccagatacagatacggtaggacacggctggggaaggagccgtcgatgctgtgaaaccaatgcggatccccgatttccgagagatctgtcgactgagtcgcagggctttcctgcaagagacgttcttgaatgtggcgtaggaaagcaacgtctgtcggataggcaaagaaattgcgttgcctatcgcaatgcagtcgaagccaggcttcatgggcaggcaccccttctgcaaacataaagtacgccactgccaacagcgagctttcggtataaccgtccgcacagtggatgagaatcttgcggggtttcccgctcgatttgatcataacgacgtctccgtccggttcgaggtcttccgatgatgtttctgggtgcgcgagataatagatccatctgattgtgttgacaatgtcctcaacctctcgggtgtttcccgatgggagcacaagagatcctgatgaagggaactccaagcgctgtgaaccactctctatctgtttatcgagcatagcgaggaagcgcggaccagggatgttggccatgtcgcatgtttcgatcaataggtcgtagccctcctcctttgatgactcgagagctccagtatggaagtagtccggggtagaccctagccaaacattggacgaaatctcggaagcccgggacattgtagacatttccagtcgctcccattgggctaccaatttgttcaggttaactctgggcgtgccaaggttcgttcaaacttaccgaaatccatagtttgacctgtcggttgacctttcgcatcgatggaaatcatctctggatgttggtcggcaacgttggagaatttgtctaggagggtatatcaattgatggttcatgaatgcgggagataaggcaaagcaacgaaccggccagaatgaaggtgttgtacgtcggccgttcctctaggggatccattttcgttcgccataaccgctgcgccttggcaaactggtttgctagttcaacaagtccgctatggctatcatcatcttcagcataaataatgatatccgacatcgcagccagcttggcagtttgtatttggaaattgcggacggagaatccctcgggaggatcagccatcaagaaatgggatgaaggtgccagcacctcatgggcgcttattgcgcccctgatgcgtgctttgctcaggtcacctccaagcttcacgatggtaatgcctcgccagcatttcggagtgtgacgagcatgtcgcttgcgacttgaaaagaaacccagctgcagatggttgtctcggtgcagtccatggagccaaggaaacatcagagaggcgtcgggtaaaggttgtgatgcttgatgagcgatcgcggctgctaatttggctccgtcgatggcatacacagcgggggatgacggtcgtccaatgcgcattctttcatctggaggagacaacagcgaggaaggctgaccgctgggccgggacacggagacaggctgaggctgagatgttggaatcgggcctgtagggcatactggaatatgtctgttcgggatagggcttgatcgtcggtttatcaaggctgaggggattggagagggagggggggtcgagtggtgcagcgcctgctgctggactagcactgtggccatgacgactgactagaacgcgtggttgaaaaggggtgtaatattgtgatgaatatggttgtgtcacttgcaattgcaacacctttgagagtcgaatcaaaagacggttacatcctttgtagtcgcgatatggggaagagtacgaaagcaatggaaatctgactcgcgggtgatcgcaaccacaactacgcggcagttgttagcagaatttcctgaagcgcgtcgcgagtatgagccagtgtcgcgaactcgagcagttgcaaaacatggaaagtaaagaagaaggatgcgagttgggagggggagatcgtacaagaccagcagagataaggcaagggggtgaagaatggaaagataaaggcagtcaggcggcagggagagacttgagataaaagaagcaatgcatcaagtagaaggaggagaggagaggaatggagtggagagcaattgaaggagggggggaagataacgtgggacaagatctgacagcgagtgtacctggggccattgtacattatgtatccccagtgaattctattgtttatacatctgtaacttacatgtatgttactggatatcgtctcatcatcatcacttatcaccatcgtcatggttcccagatggtggccccaattaattgcatctgtatccacacgctccaccgccgcgggtctggatgttatccgcgtaaccttgtattaattgatggtatgatatatgcatcagatacagatcctgaacggcatgtcccctctagacagggatcctgaccacttttctctcgcgtatacttgccccccccctaaaccccacccttcaaaaacctactgggctcaaaaaaaaaagcgaccacagacaactaaccgttgatgtggccaatcactcatgaggcagaccaatgatgacgatgagatttgccgatatctccctcggaccagattatagccttgtctgtgcgtctggggagggggtttccaaggttcttctcctattctccttggttgatggggaacaaagaacttccaaggttatcaccccgctcgagaggatatcaggatccacatcggatgaaaaagccctgccaggtcgagccatttctcctgcatttcgtgtccatggaaacaggaaagtcaatttgccaatccaaaaggattccacgggcactccgtaattgatgtatatggtaaacgttctccatacacccggcagcatccacccgggcatatagtactgaatctcaattttcagatgttcccgagggtggaaacattcttgaaacatgatacatcaaatgaaaaaaagacccaacccacatattactgcttcgagacatctaaaagtacttatatccagtatcccataactagttacagggtggaacgaactaaccccggatcgccactgcgatccactcgaggtgggggacatcacaacgttagatgtaatatgcccaatagtaaacagatgcctaatcccgtcaatagcccgtcccgaaacaacacccttgatcttgtgatgggtatgcctcattgcaggtgcccaagattgggaccgggtacctaacaccgtcgcgccagtgcctaataacaagcctatgtaccatctatatgtcggcaggtatacccaggtcgcgaatgtgtcaatagcagttaagtcgtcttatcttttccctagcgtatcgctggatatttccgccataccggagaacccatgtcaactctcattggtcacctatatcttacaactcctgagccaacggccatagagaaaaagtgggctgtgtcggacggagcgctgcattgaacgatcgggcaactttctgcagatcctgcctcgattcctaccacgtctgcagatcccagctgtcctggacatcatgactaggtgcatactcccttcagtcgggttggtgagctatgtccagaaagtttacgtgtcactaggaatggaataccacctatgttaccagcgggttggtatcaatattatcagtgctgtgcctcggttaaacgcccaagtcggcaccggcaccggtatttggggatatggatactctatgcgccagtcggaacgtgcaggaactgcacatcatcgggcggaaacaaaataggctgttccttgtcttggatctgacacatgttagctgccacagacctagtgcttaccttagttgatatatctaactaatgcacatggccgtttgctacccaagtagccggttaattccatattccagtgaagccacatgataactgagtctcggtctggatagggaattatgcatattggctatggcctgcgccacattacttaggggttcactaacccgagaaagggtagacaggttgaccaactgtcttgactgctgcctatctgacttggacatagtcttgaactattaagcggaagtcgaaagcccaatttcagtcgggcggcatgaagaacgacctaatgagggttatttcggtggcccatgcacaagggactatgtcgtgcgaggcgggtagctgccgtaccttgtttccctcgcgcttgcgaggtattccttcctagtttggtacaccggtctcgattgaaattttcaagaactgaccagtcttcattagtgatacgcgacagacttagtccatgtccagggaacctggtcagtccttgccctttcccagatactgggctgcaggtgttggtgttggtgttggattattggactttaatggcaccttctgcatgggcgacatgtgactagctgagtacatcatccagcccaacagcacaaatgcctcatataatatgcgttgactgagattaacatgatcaggcttctatatttttcattggacagacggtcaccatacatcgaggctgatagacatgaattgctctcaaggtatatatatgattggaaccctattgtctgctcagggtgctcatttgttcgaaaagctcacaccagaatcgccatctacttataacaggtcattacttagagacacacaagctgagggatcctaatacaataacgaggcctttccatcgtcgggttcaatcactatatatatctgcttccacaaccacgtctaacatgtgtcgagtatatgcaacacgataggattaccctatttgctattgcatgcagagtctatgatagacgaacattgcttgtattgacaaaatagtaaaatcggtagggcttaaggatcagggtaaacgatctctacgtcacttatcgtgggggtgagtacctcgggatactctcggccgttttatggaggaaagcaaggagtcagcgaccgaaggtcatagcttcaggggaattatatatccttcttatcatcctgctggattggttcttgcgtgaaaattagccaaaatcagccagagagtgaagtagaagaaacctcggaaagagcgggcgatgactgataagacaactcggtaggcggtgggcaatcaaggtgcggcccaagcgcaaacctctcgcttgtgacgaccaaagacttcgcggatatcatatcctctcttctccacatcctcgtctttaaagtatctcgctttgttccaagtccaagacatgttacgctgtggccagtgacgggcaagagttgctggtgatcccctctcgatatcgccctaagcggggtatctccgacatctgagagttgccttatatcagtcttgatttcatctacaatcccgaacctttctaaaaaatggccatgaatttcgtgacatttaaccaggactatagctatctggctgtgggtgagtctccctccggaattgtttctatatttttgtcgttgaatgtccattgaccgcatttatagcaacatctaagggatttcagatcttcacaactgaaccctttgccaagagctatgaagccaaagaggggaacatcgctgtcattgagatgctattctcaacctcacttgtagcccttatcttatcgccaagacgcttgcagatccaaaacaccaaggtatcttgaatcgttactcattcatgtcattacaggcagtttatataaacatggaactaggaactaatctttgaaatagcgacaatgcacaatatgcgaattaacatttccaacaactgtcctcgcagtgaagctgaaccgcaagcgacttgttattgtccttgaggatcagatctatctttatgatatccagaccatgaagcttttgtccaccattgatacctcaccaaaccccaacggtacagagctcttgcgcctgtttttcccctttcattttaagtagttttttgcccagttctgacaagtcaacagcaatatgtgctcttgccccctcttcagagaattgttacatggcatatcctcttccacaaaaagcccccgcagccgcaaatacaccggcgcatgctccccctggaacgacacatgtatctcctacgaccggggatgttctaatctttgatgctgtaaagctagaagctatcaatgtcatcgaagcgcatcgctctcctctggcactcattgcgctgaatagcgatgggacattgcttgctactgcatcagataaaggaaccatcattcgtattttctcagttccagatggccacaagctgtaccagttccgacgtggttccatgccgtcacgaatttacagcatgtctttcaacaccgcatccacgctcctgtgcgtctcttcatccaccgacaccgtccacatcttcaagttggcccagcaaggaccatcgtcagatggctcttcgttgcattctcctccaggtcgggaccatggctctccaccaaatacatatgggtattcacccgaggaagacgagacgggcggggatgctggctcagattcttcctcgcggaggcacaacggcactttgatggggatgcttcgccggacctctcaaaacgtcggcggcgcagttgctgccagaatgggcggatatcttccaaagggagtcagtgagatgtgggagccagcgcgtgactttgcttggatcaaattgccgcgatcgaacccaggccctggtggaaacacaggccccgggccgctgaggagtgtggttgccatgagtagcaatactccccaagtcatggttgtcactagcgatggcaacttctacgttttcaatatcgatctttcgaagggtggagaagggaccttgacgaaacaatactcgtacgtttgaactattctcaatctcggtggatcaagtttaacgttaacactcatatcacagggttgttgattcgaccgataggctgggctacactgcggagtactgagagccaagcccctggaagacaaattaactataaggggatagatctgcccttaacggctccttgctcttcccaacgcctcttttccatgtttctctgttttcggcattggcatttactgccgccttttactatgaatcatcatcctctttttgagcctttagcgtctcaacactcccctcccgacgtttttagtcaggacttcccatctcatacatggtgtattggcgggtctacttcattttgtggctggctatatcgttatatcctctgcttccgaattcaagtcttgaatagctactttagcttctcatacttttcctattggaagaattatatgcagaaatatcttcaaacatcacaagttaagagaggggacttgttggatgaactgggaggctcaacttgatgaaggatgatatgtataagcgcgtatgtacatagaaaacaagcatcgaaagaaacgtgctcaagagtctaaaagttccggcggaatttctgaggaatgttaccaacgacaacttgaatctgctccagcttatcgagggcaatagccgcatcctcctcctcgtcatgcttgcggaaatgttcaatatcctccgggtgggtcaagtcctcctccgtggtatcgtcgccgtggaacttctcaaagtgatgaatttcgtactcatactcaaggtccccatgatgtccagggccgtaaccgagatcgggaagccggttacccgcagctagccccgccagccagtcctcccgattaataaacccagtgcgcccagtgtcgaagatctcaaacactgctcgcacggcatcttgtttcttttcttcactgacaccggcattggattcgtcgttgaggccgtatgtcttgcggacttcgtcttgtgaccatgtccccgaggaatcgtagtcgtggaggatgaagaatgagctcgggtcgaaggattcaatgtggtgttcctctagatatgacaatattagcaaggtcaacttctccattgacgcatcgccaacatgtcttacctatcatgtgtcttgtggcccaatcatctgagggggcttcgtcatttgaatgcgagccgtgggcattggcaagtccgctcaacgcaagcagcccagctgcgagaccgaatagtttattgaccattgaatattgtaacaaaagagattcgttcaagaaaacaaaaaagtagacagatttacagtgcttggatagacattcaacggtgtcaggagatatggggtcttagctcgtttgcaatgtttgcactgatgacccgacccgagcatttgcggaatggaactttcaattaatttgctgcatcgcatgttaccccatctatttccctactcctacttccgacggggctccgggaggagtccaattgatctttagtttgcaatattaccttttggaacacattgtgcgatagcaatgccctgagaatgcagggtttgtggtcccgtactgtttcgaagcagtcgtcctgccgctgtgtcggatgtttgagcactactaccaacggggttacctcgcgggcagcaacctctagtaagagacgacttcgaattggaaactctgttaccgcattttacggcagcattttcgccggtgccgccattgccgatgcgagcgtgaaggatcgccgccgacatgactgggaggaaaagattgccgcggtcaaggccgaggtgagcgagttggtggacgaagaggagcgcattctggcgtcattacaatcacgaagagaaacacgaggactcaatcgcctaatacaagcgaggggattcggcactgtcgcttgtttccctcccggaacccaattcccaaccagcttcaacagaatacgggccttccacacagaaagaacacgtttgaacgcggcgggggctcgactggtggaaaacaagccagtcgaggaggacgaacacactattgatgagcaggatgagagcgagattttccttccgcaggagacattacctagttgggtcttggaagatgatcttcgtctgaaggctattcagaaacttgctttaaggcaatttgctatccggattttgctacgaccggccatcgcacatcgttactcgggcgtctcaatgaactacgcggcggactttgagactcctcaggtaaacgtcgcgcagctcctggaggagctgaatcgtcttcgccatcggatgaacacattgaaaacaaacagacacgccacatatagcgatatcacgcaggactatgccgcgagtcaattgggcgagatgcaaagagagcgcgaggcccttgatgccgaactcaccaacgacattcgcatctacacgagccaggagatgcctctccaggaactgcttctgcggatatccaacaacatcttgagctcgagggacccggatcgaccaaccgctttccgggtcatgatcatggcatttggccagacccgccaaaatgacctggttgagctgcttctgcggacattattgccgaaccggttcttcctcaacccgtcgctcgtgatcactatcatcacattcttcagaaaatcgaaaaaccttaaggatttcgatttgttcttgaaaatgctcggcggagaaggctactccgtcaacttagggagcaggggggtttataagcaccgtacggtcaatggtatggatctcattgttccatctttaaatagcagcaatcccgtcatctatgccgccttgatagcggcggcattacgtttcgaccagcccgatcgagccgacgcttggcttcaagctgcacgtggcggaggtttctttgatagttgggaaaccctgttcacctatctacggttttacagccttcgaagggactgggataagggcgtgaacgtcttgagacgagccgtgacctacctcttgtcatcaacggaccaccgtgtagattccgtcgagagattgcttgggcgaatggtcggcctctgcgactcctgtgacaaactagatgcatcggatgcattggtaaaagctgccgtgcacagtggctttgatccaagacttatatcacgacagtcggactcaggacctttcgtccatggtgatcacaagcggtggtcgaatgctgcgaagcaaacaccgagggagaacattgaccgtcccttgtggcagaagtgctacgactttggaaacacctttggggaatacctgagccaaattgaggtgccggtagaggataccttcgcgcgacgcaatgccaaactggccgatcagcatgcagagaatgctttatttactgccctgggacgtagcagaacgccagcttccagtgagggaaagacacctgctggcaacacggcaaatgaggacatctccacactcaaaggcgaggttgcccaactccgcgaactcatctatgagcttcgcaagcaccacatctcagacccttccacgaaagactcctcccgcactccgaccagcgaagaaaccctccctccacccgccgaaaccatcacaacccttaaaaacccccaaccccaaactcccccactaagtcgcaatttcaccagaacttcgactaggatcagcctcgccaaatcgcaagtggcatcttcatctccgcggaaatcaagcaagcgaagcaggcggcgacaaaccagcaccgaccaaccatcattggaacgcacagctcctggtgccgagcctgcagtgtttgccagctgagttgtggatcttctaaatcatggacattgactgtccgtgtactcactaaagacggaggagaatttcttgtatattaaatgactacatttgtttccaatagagcacacaggaacaccctgggcaagcagccctgaatgtattaaccacccgagggcgttggtggtgcatacaattgatttaaaattgatttaaaattgattccttgaagaacaactcatggtgaccaggcctgagcctctcgagtatattgtattttgatccagtctcccaaattagacagatttcgaagactggttgaaggcaacggccgaaaaaggattgtccgggagtaaatatggtatggagaagagggagaaagcagaaattctattcgatatattgacatcgtgatgagaaggaagcagtgcgacaaacaagcgtatcatgcgtgaattttaggctgaacagaaacaagtggtctatcgacgcttctcggcgcgcatcttctccttgcgagcgaggcgatcagcagcccgagtaagggcggagcggatgtcacccttggggaagctgttgatatcgtagtatgtaggggcgatatcctggacaacagttagtaaatctactggttataagacaggaatggggaacataccaaaagccattctggcttgacggcagtgacagtacggatgtagttcttggttgtgagaacgaattcgttatacaaaacccattcggcctcgtgggccaggacggtggacgggtgcaggagcacattctggttgtccttgatggtaaggtattggctcttgccgcctgtgtccttcttcgcgacttgcataaagaaaccggcgcaaagggcgcggcggatgttctcgtagtacttcttgtcatcgaaggcagtggagatcatctcgagatcctggcgttccatgatgcggagcagctgggagcggacattatcagcggattggagagcccgctgggagaggaagtggtcgtggcaccactgcttggggtttgcctgggcgtcactgcttcggtatgcgtggtagacgttcagcattgtcagatggtctccgtcggggtgggcaaacaggttcttcatctcatcggcacgcttgcgctgggcaggaggacgaacgaagacctgcggtacagacagaagggcggtgatggaaaggatttcattagagcagtagaattcgggagagctgatcaacataacagcaagggcagggtcgagagggaagtcggaggccagacgacccagctgagtaaggtttccatcatcatccagacaggccaaatagttcagttcttccaatgctctcatcagagtctctggcgcaggcgggtccatcaaatcgaagtggacgagatcatcaacaccaagcttcttcagttcgagcacggttgatgacaagtttgaccgcaggatctcggggtaagttgactcaatcaattccttcttgaatgcgccctcggtgtaaagacggaagcactttccgggacgtgtacgaccggcacgaccagctcgctgctgcgcggaggccttggagataggggaaacgaggagtgactcgacacgaatgcgggggttgtaaatcttttgcttggagaatccaggatccacgacgtacacaataccatcgatggtaagagatgtttcggcgatgttggtcgacacgatgaccttgcgcccggggcggccgcctggtcggcgaggaggtggtgcagggtcgaagatgcgctgttgcatgtgaggaggaagactaccgtacaaagggtagaccttgataggaccagcgtctgcctcgcgaaccatctcatctccctcaagcgcgatttttcgtgaagcatcttcaatctcttcctcaccagtcaagaaaagaagaatatctccctcaccttcagtggcgtggatttgcagcacagtccgaactgcggcctcgacgtaatcttgctcaggttcaggggtgtagaagatctcgaccgggtgggtacgaccagggactgcgagaaggggcgcgtccatgaagtaccgctggaacttttgcgcatccaaagtagccgacatgataataatcttcaagtctggccgacgcaccacaacttccttcaaaagacccatcaggatatctgtcgccatggttctctcgtgagcctcgtcaagaatgattgtgctgtagcgcgacatgttgggatcgttcatagcctctcgaagaagcataccatcagtcatgtacttcatgatggtcttcgggccggtcatgtcttcgaaacggatactgtaaccaacttcctctccaagcttgacatccatctcagccgcgacacgttgggcgacggacatggcagccactcgtcggggctgcgtacaagcaatcattttgccctgagtttgagggagatcatcgtagaggacgaattgcgggatctgcgtagtctttccggaaccagtctcaccaacaaagacaaggatctgggactgttggtagagttgtaggaactcatcactgaataaaatggtcagtatatatatttcttccggaatggctgtcgggcagcactcaccgttgcgtatggacaggcagatcgcgacgggtcttcaggattgagaaatatttgctggaaaaaggtcggccactgaaagggttgatatcgccatcttcggcctttttcgccatcgctgcggttgtctggtgtcgcttgaacttggccagggccgtgttgtcggagccattgttgttctcgtacatgtgagcgaggtaggggttgttctttgggtccccagcgtccatcttctggcgcttcgctcgcgcgcccccttcggaatcggatcggttatcagccatggtggaggtgaaagcaaaaagagtgttgaagggcaaactcgggggagagaagaagctgagataccggagaaaaaaaaatatgagataggaaggtcggccgagcgccacaactgcctatcaggctcaccgccagactattctgccgctctccacaaagggatcgataatctttgagcttgttgacgccctgtgtgtttttggctggacttctctgagccagtttgtctgatgcacgtggcttgtttgcataggactgcctgatatcaagcgtattagctcctctattgctcatcacgagcctttatccacatccctagttccagaccacccccaccattgcgctagacttctgtgtcaatatggagagctacaattcttcagaagatcccgggccagctttctgcgtcgggcaccatgagcacaacagactagttactgtgacccctcgggtcatccaaaacgtacacgagagtaatgttggttctttttcttacctgtaacattactttcataaatgctaacttgatttgatagtatgatatgatgactgttccgatcacgacctctcatttccactcgcgcgtcctagggctattgtcctcttatttggcgactctgcagtcgccaacttacgatgttgttgggaccatggctaccaccctgaacactcggcctgtggtggttccaccgctctcgaaggcagattcgtatcttaccccgaatgatgcaaccagccaattggttggtgtaaccagtagctggattgatctatgctctcctgacccgttgattgcagacttgtcccggcaagttctgatgttggaagttgcgtatgctgcgttttgcggcattggatatctgttgattcctggccctaagttgcatcacggtgccttgcattctgagggtgtcatctactatgcgcgcgcggttcaagacgctctagacctcggtccctacattcaatttcatatttggcagcagatggttgacaacccagaggctgaagttgacacaatgggcgacttggcccctcttgctcgggcagaatacctggtgccagatgagggggatccactcaaggttgatccgtttgggagttgggatgcttgggattcaatcagaaagacttgcaaataccacgcaagactgttcgttggtatgagctaatcctccctttcaatggtcatcgccattatgacaatattttgaactaaagctaatctgaatcacagccctttctttgccgaagcaactaccgtctctgtttgtgcaatcccgatggcattcggaaccagtgcgtttactgacgattgatggctcgacgttcctcaagaaccagaaaggatacccagtcttgtccaagtcacaccaaggtttgattgcaaagatgatgcgtcttcgaacggcgccatggattatcctttgtggtgttggtcctatccctggacttgagaatgtcgaagaccctgataccaacacggcttcgctatctgggtctgactatccaagtctgtcacaggctggcaagaagcaccacgaccccactccacatctctcgtatattcgcaatctgcagcagcgccaacccccgcggacagcaattgagagatttggtgtgggataccaggactacttgcaggcacctctacagccgctcacagtcaatttggagagtatcacatatgaagtgtttgaaaaggatcccatcaaatacgagtggtatgaaaaggcaatctacaaggcattgagagactgggccgaccagaagaaggccacgtctcacccggacggaaaagtgattctcgcagttgtgggagctggtcgcggcccgctagtcactcgcgccctgaaggctagcgcagatgctggagtggatattgatctttgggcggtggagaagaaccagaatgcgtttgtgttgctacagcgacacaacgacacaatttggggtggtaaggtcaccctggtccagtcagatatgcgaagttggaaaggacctctggtccgacagcagtcgactacggtcgctactggccctgtgggcgaatcccttgggatcgagagctcgttacttgagtctccgaaggatggccagcatgatcggccatcagaaatttctgaatttcaggcgtcggctatgtgccacactcatgtcgatatcattgtctcggagctgttgggctcctttgcggacaatgagctttctccagaatgtctggatggtgtgaacgatgtgatcaaccccgtccacggcatttccattccagcctcgtattcggcacatttcactccgatctccgctcccaaattgcacgcggatgttgtgcaccagacggcgtccaacccggccgccccagagaccccatatgtcgtgatgcttcatgctattgacttcctctccactaccgagacgcctcctagcgctgaaagctccaaccccaataatggaaaccgggcatccaccccgtcgtcgtcattctctactactgaattccccactccctttgtgcagaccgcatggtctttctctcacccgaaccgacacattcctcctcagtcccccatgcagtcgaccatctccaacgcccataatgtgcgccaaacacgtctggctttcccttgccagaaccgaggtgtgtgccacggtctggcgggctactttgaaacagtgctctacggtgatgtggagttgtcaaccaacccggtgaccatggatgccaagagcgcaagcatgatcagctggttccccatctacttccccttgaaggttagtatttttgaaaccttccaactaaacccctcgcttctgtccttcccatcatactgacaacgctctcaagacccctcttagtgttcccgagaacggtgagatcgttgccacgatgtaccgtcaaaccgatgaccgcaaggtctggtatgaatggatggttgaggtttatgcccttgaacctactggggcattcgcaaaacccacccccgtgagctatgcgcaagctgggtccgtcagcgtggaaagcctgaaagctaaggaaaatgccgcgaagaagacccaccgcaccggctatcgccgcgtgcgagtgggaatgagtgatttgcactctagcatcaaggatggctgcttaatgtgaaatttataagccggggttgaataaaagctgttcgagccatgagctccactattgttaacgattactatcacgattgcagttgaattttgccgtttgagaccgtcaaatctgatcatgcgaacaacgctaagcactttgttctagaggttcttgccaagtaaagtacggagtcaccttgcatgtcttggcagggacccgattttaatcaaactaacttcgggctgagctgagcagttcagccctggctgaggctggaagcttccgatctgtagattttcatgtgagataaacatatgtcacgcactccctatattaatgtgattgtatagagtactccttacttggagtacacctggtttcgggttcggcgttgccttacttaaagcacacgcgatctcagattctgcattgccttaatcgccggactgaccggaatgaaataattccccggctccaccaatgcctccaaatttgatctatttcgtcgatcattgtgtggaactgtgctgaattccctcgtcacggagactagtatcgtatttttatcatatgccgttgtttattggttcccccgacaggaaatggcttgcgcaagtgtggaacccattcaggaacatactgtatgaatttgccaggggggatcgaacatataaagccgtgggtccccctggcctcaattaggcaccgcgattgacaacaagccatcatgcgtttctctttattcacagcgctatctgcagcagcatcgttgggtcatgccctccccggtcaactgcaagctcgaggtaccatgccacaaacattgatcagtgcatcttgaccacctcgctcacacccggttagatgtttcgactagcgaactgaaccagttcgacttctgggtccagtatgccgccgcggcatactatgccgatgactacacagctcaagtgggcgccaagatcagttgttcgaaaggaaactgcccccaagtggaggaagctggtgcgactgtattctatgacttctccaagtaagcgacgtccccgatacaatacccgacaaaacaatttacttacacatgcacagcgccaccatcacggatacttccggcttcatcgcagtagaccacgccaacgaggcagtcgttctctccttccgcggatcctactcagtgcgcaactgggtcagcgatgccatattcgtatacacaaaccctgatctctgtgatggatgcctcgccgacctcggcttctggggctcctgggtgcttgtccgcgacgacatcatcaaagaactgaaagaagccgtctcccagaaccccggttacgagctggccgtagtgggccacagtctcggtgccgctgtcgcaacccttgcggtggctgatctccggggcaaaggctacccgtcggctaagctgtatgcgtatgcctcgcctcgggtggcgaacgtgcctttggctaagcatatcacggctcaggggaacaactaccgcttcactcacaccgatgacccggtgcctaagctgccgttgctggccatgggctatgttcatatcagccctgagtattggatcacctcgcctaacaatgtgactgtcggtgcttctgatatcaaggttattgacggagatatctcatttgctggaaacactggaactggtctcccatcattggaggatttcgaggcgcataagtggtactttatgaagactgatgcaggaaagaatgatgggaggccgttcaagagggtttgattttcttgtcgaattttgtttaatagattctagaattgctggctgacattaatatgtataataaagaataataatggatataatttccgagttatgcaaggccactgggcagaatgtggtctgagatgtggaattgtgtagaccgaggctatcaatatgatccccaaaacccaactaagcactaataagcttgaatgataaccaattcgcctatttccgggcttcagaggacgtcgagtcggagatccgtcggctttagaccaaaaagaccaaactgggcgatcttagtagtttctggccgtcccgtttgatcctagcaatgtaaagtggatatctcctgccgagcggggttatctggaatcaatggtataagatatggctcgaatctcggatttgattggggatgtccattcaaaatggtgctatatccgaaggttttgttggcagtgctggtaagctatgccacggcacaatttgtgcccgcacctaccgacttgatcaccaagaaaggacacgccggcatcgatgtgcgatataaggaagtgcctcctgggatttgtgaacaagaccccagtgtgaagagttattctggttacgctgatgttggtgaggacgagcatattttctggtaagcattcgcgatagggatgagccccagacatcgactgactagcgcaggtggttcttcgaggctagaaacggagatcctaaagatgtatgtccccacggcgtttgagcattgatcatgtgcactaacaataaacaaggcacctcttacagtttggatcaatggaggcccgggatcatcgtccatgatcgggctattccaggagctaggcccctgtggagttgatcacgacggaaatgtatacaacaacccttattcttggagcaacgtgagcaatatggtaagtttgcactgtctttgttcgccgggactctagctcaacttgtcactagctcttcgttgaccagcctgccacggttggactatcatatacaatcccgattccagcctacgaggatgacgatggcaatgttatccagttgcccagcgaggagtgccccgattatgcccaggaccttgggacatgcggcacatactccaagccagacattgccctagtccctaatacaactgcacgtgcggccccaaatatgtggaagacactacaaggattcatgggagctttcccaaagtactcgagaaatggcttcaacttcgccactgagagctacggggggcactatggcccagtcttcaacggtaaagatcgcaaacacttctaaatgcgactggcgctaatttcagctcagagtactttgtcaaacaaaacgcaaaaaagccccatggctcgattcggatcgatcttgagaacgtccttattggaaatggctggttcgatccgctgattcaataccaggcgtactacaacttctctatcttcccgggaaacacttatgactacaacccgtacaacgagtcggtgcaggccgaatggtacaacaatctttatggagaaggtaactgcgtcgatcggactcgggaatgttacgcgacgggtcgaaacgatatttgctctgcggcggacgacttctgcgcttcgaaggttgagtcgctctttgatatctactcagggcgcgacgagtatgatatgcgagagttgacacccgatccgttcccatacgaattctacgtcgattatctcaacagccccaaggttcaagccgctattggagcataccagaatttctcggagttctccgggactgtgggcaatgccttcggaagcacaggcgacgacgaccgcgagtctgcgacgatagagaatgtgaggaagttgttggaagctggagtacaggtattgctgtatttcggggatgcgtgagatctcccacatgatgagatgactagcctatgctaattcgagttctagcgacttcaactgcaattggctcggtggacaagttgtggctgaggagatcaatgccccagggtataatcacgcaggtttcgtgaacatcaccacctcggacggcgttgttcatggacaagttcgtcaaagtgacttgtttagctttgtgcgaatttacgagtccggtcacgaagtacctttctaccagccattggctgcgttagaggtgtttgagagagtgcttttgagaaaggacattgcaacgggtagccaccatttgaagccacacggcggttatcgaactcatggaaccccgacaagtgactaccgagaggggaacagtacagtgattctggaagtgctggatagcaatacgacctataacacaactctcaatggaccgaacccatctagctcggcttcggtcagattacgcagccgacggttgagaagtgtttgaacagtgtacttgtgacgcaactgcgtttttttgtgagatatgttccatttcaaagattcaaattagaagacaaatggtatggtgaagccatattttccatgtccgagtatatcgacgccgcagtgaaacaattcccagattacattcctccattcgattcattccgttctctctcttgggaagtctcagttcaaggcgacatgatgacacaagtagcgatctactcggtcaggtcagcagtgtcggcagtgtcggcagggtcagcgtcgctggacttctcgtcctgagcccgctcaggcacagacttggtggtggtcttgcgacgcttgggagctttatccgccttcctggaggatgtgtctttggccacgccacgcttggtaccagaacgggacttcttagttggtccaccgttggtgtcctcatccttggaattgacagcctgggtaggagactgcactttcaaaccaagaattccctcaaggtggtgcttagcacgccagtagttggtattggcggatgtcttcttcatactagcgagagtggcaagcttctcggagtcaatctatgaagtaaatgttattagacagaaataggaggcatgatgtgagtctggatactgaccttgccatcgtggcataaagaaccataaatgagcagtcgaacatcagctgccttgagctcggagagcttgtcatcaagcttgatagaggaagtcattttgttaaacttgtcgattggataagtgagcgatgagtcaaaccggtgataatgaacgaaagtggatggatgagaagcgataaagaaacggtgagggaacaacgatttcagagaaccaagaagagagaagcatgcagaggaacaaattcaaaataagagcgtgccagatgtgatgatcggcgagaagatgtactacctattagaaatgtatcgttgtttcggttactgattcttgcaatctagggcatgatatagcttgaacgtttctaatgtttaacgcctggtatgaaacataaattagcatatattatgatatttatcatctacgcacactcacggaactaagggatacttaggaccaagacccggagttctgtgataatatggatatggattttacagactgtacaacaaattgagggctagagttcagggcaaataggaattatactaaatgggtatacaagtaagatagcaatcagcttacttgggggccctcttatacttcgaatttcactagtagtattcactaaatcacagtttcgagattgtatgctgcatgaaaaagagttgcttcatgtgagctcctatcaagataccaattcatttgcccaacttgcagtatatcttgcgaaactatgtagctttctttgatcttagtgatcagtttataagttccgatggtgaaggtgatcctttatgtggctgtgccaactacgctgccctgcgaactgccctgcaagcctaagccacatcagccacaccagatatataaacctccagtaccccttcagggaatatgtgtttgactcatcatatgaaaaccatcctagatttccgataatatattcaccagtctaatatacctcgctagtctacaacttactcgccacagctattcacgcctttcgatgtgcccaatacaagaatcggccaagagaaaggagactttaaatcctccacggctttcctcggtcagtgcttagaattgctcctacaacattgcatgctaatttgtcttgtctggttataggttattgaagatctcgacactatccagcctcagacacgccatgttgataaggcgctggaaaaaagtcgggactattggtatcgcctgacatcactagctcatgcctatcgggatcatggcttgaatccagattacacaaaccctcgccacattcttcatagaattccaaaactgcatgtacgacccgaaacaacgtatgcccgcccttacggagtttctcctcttgttctttgcatgcaagcatcctcgacttggaaattagtaggaaactcggattgcgacagcattgcgaaagaaaggacagccgatgctatgctcaaggtcggcactagtgttgctattccctatagtttcgaagggaatgccttcaattcttggattggcacaacggaagaaaaaacacaccggtccaaactacttggggatcctgacaattggatggtgttatgtactctctgcacgatttgttgaaattcaaggcgagggtgctactatgcaatatacagcctcttagatcgaaaactacgatgaagactcttgcgacctgccggagactgatataatcgattttagggcagcagatgaaaatataacttggtggtggtatgcaatactagctcaacgagaagggtggaaagccattatcaaacgaacccaccgccacgaatttctcgccccgtgggcggtgtcacagacatgcaatacacgtttcgctatcaatcagaagggactctcgccaacctcctcatatacacccttaacctcagggaaagcttttgatgttctagctgggtttgtacagttccataacctgggtagccaacttcctatcgcgcctatgacagccataacgctcccaacacatgaatactatggctcgactgtctaacttccctttccaagagcatctggtggtcaacaacctacgactcccatggatgttattccatcactttggtccagtttatacgaggagctgccctactacatgactctgagctgtagtccggaagtagtgctatctactctttgtggatcattcggcgagcccgaagtcccatgcaatctcgtcgctccctggctgcatccgcttttcgaagagatactagctgagacatctcccacgggtagccacgattacgaagcacttgttctaatcggtgcaatacatcgacctaatataggtgctctttggattgtagcggttgccggcgggctaaccccaaaaattattcaaaaagtaagaaaaggcacgtctcctattaatgcacttggatttccctggactggctgtcttcaaagcttcattaatattccaggttcgggtccatacacgcatgggaaccctgagcatatctcaaggctagacgtatggcgcttactgcatcctccccaaatcgaggatgacgagctgttgtataaaaccaggcctcaaacaccttgggcaccctgggggtcgtgcttaccaaaggattgtgcccttcgagttactacacatttgaaatgcgctcgacatgagtaccaataccaccattggaattggcacttagaagaaggctcggttattcaggatcaggggttttcaatagcacccctttcgacggttacagaatgtccttccgatatgattggtattagggagcaaagaaggttccctacgagggaacttgatcaagaggcttccgaagaagccacactgtatgccttcctttggtttggcatcaacggagagggtaaaccgtcggaaactatatatgaagatgcctggctcgagggcatttgggaggaagatgaatatgattgggaagacgaggctgacgatcaagattcgaaagagcctgttggtcaacttgaagaccgagtgaaagcctggctgaattcagtcggctgaccaaattgcagtctttcaaatatggcctttattcctttattgaatatattcaccagccaaggtgcacatctaacttcttgccagacccccaactctagcgtaatgagtaagcttctgcaactgactgataggtgcacagagacaatacataagggcgagcgataaaatgtcaatacacactagagaaacaacgcctatcctagaagtagcggtcagatgcctttcccaacaatgttactgataagataagatcaccagatgccctttttagaataccaagaaaaagcaaatatgtatagtgtcaccattttcaagaaagcggtgtgataataggctgtaggcgctgttgggtggcgcaataaggcgcttcgcccggttgccgcttcgaggccaccgaaaccagcctcatgcaagggatgtcacaaacggcgcgtatagaattcgagtaatcaaaatccgccaagtcatagtatcatggtgcaataccatgaccttgggagggtcgttcgtacatctaatcgatagatccaacctacaaggctgcacgcattccagatcataacggggctatttcccagtgctaacacgtggaggagctctttgcgcagaccatgttgtacatcaatgtagagactatgaatacaagtattcaaagacttggggaatctttgtctagattctaatgggtaccgtaataatgtgattatttacaagacaacctcacgaggcaccgagatcgcgatttgtgaataacgtgcaggtagtgcgtattattatgtagagtctttaatgaaggagttcaaattaagttaaatccaatttgtctcatattaacgcattgtcatggtatcatatcggctgaagggagagagaaagacgctaaagcaaatgaaaagcccaaactaagcgtatcaatcgctaatataaataattctcaacggtcgtcggacgggtggttcatctgcactggatgatcctcgtactgcaagtggtgggtgggaggccacgaatagagcggtagttggtcctgaaataattatcagcctttgtgttcttgctggaaacggatttagattgcactcactaggctctcaatctttgccaacgtaggatcgatatcaatatcagagctccaaatcgaggggtccgtctgctggtagggtgacgcaaaggcttcaggcttcaagatgctccggaggtattgatcgatggcagtcaccgtctctaccggcatgcccgaagtgggatattgaggattcaaaagggattcgcttgcgacgggtgagctgcatatatcggtcgtataggaatagggggatgggtggtcgtgagcggatgcggaagattggctctggccgctggaatactgtgggtatggcattgatgaatccatgattccccatatcccgggataactgtcggtgctatccacttggaatggaatagcaggcgatttggctggttgcgactgcgtctgttgttgcaggctcgactgtcgagatgatctgtcactgtgggcgtatggtatgttttcctttggtgctgaagtcgcactttcattcaggtcagtccacggcttcgattattgtcaactgctggggggttactcactgctggaccaaatgctgggtcaagtaatctggacgatggtatgtctttttgcacccttcgtaagtgcaagggtattgctttttaggatcatggctgagctcatgtcgtctgcggtgttcagctctggtaaagacctgtgtcatggcggtaagcgagatgattcattggcaatattagaatggtacttaccttcgaacatccagggcgctggcacgcatggactcgcttgcccttcatagccttgctcacccggtgagagttttcttgtgggggcgaagaaacatcaacgagaggtctgggataattcaccgtttggcttgcgttgttattgtggttggccaatgttgagggcgtgggagtaggatatccaaagccgaatggcggcgtaatggaggcagtagatgtggtgttgaaggacatattgtaggaaagaaaataagctcttatatggccaatgcggctcaatatgccacccaggacgaagtggcacgtttagacgttgtggaagtcgtacgagctcgagtggggagatgaaagaaaggtaaaagaaaggtatatgggaaagggggttaataagacttttattaatgccaacaggtcaacagctcgatgggtgggtgtgtcggacggtctcggtcgtattggatgccgatctggtgcctaatccaaggttataggtacatgggaaagtcgttttcgaaattaagcgcttccccgtctttttccaccgtgtacctaagaaggaggaggagatatccataaaaatgatatttcagaagacggttgaaaaaaaaccgaaaaaaccaacgcgatgacaagtccgcataatcagcctgctattcttgttaagaaaacaattaagaaccaagctaatactaaatagtccgtaaagaaaaagtctgaaacgactcagagcacgcctagtgattataactttcacctagcggggatcttttggggccaaaagcggctgaagcgacgttcggtgatttccgataatgacgggcatcacccccagtcaacaatcagagcctcaatctcctggatcggtcgctcacgtagctgagctggacatctctacaaattcatcttattgggttgtgatatgccccactaggtgtggatcattgcgatgtagagcaagcggcatgacatgttacaacaacccggcaggctgagtcgaaattcaaaccaaccaacacagaagtatatatgtgattggctcaagtacactctggtctaaaaaaaggaaaaaggaaaggtgcgagtcgacgtatacccgaatggttttgattgaagaggctcaacacgccagagacccactttttccacttggcgtcgattctggccaatagaacgtcggtattgtatccacctgggcaccgatccagtctccagtccgaccttgggcacacgggtggcttctatcactctactttatatgcacttacggacttgatgcagcgtaggcgcattgtcgcatgtcactttggaatgagacccggggagatctagctttggagtgttacatcgggaagctgcggtcttagtacgtggggttcgtacgtggggtatggtgggggctaaagcatattcccggcaaaattatttggactcgggaaatagtatcttgaacttttagtcgggtgtgccttgccaattgagaagcgggtcaaaggcttcaagtggtggtcagtgcacatgatacttacagttggccgttcgtcctgttgaatattcatttagacgggatattaagtagtgatttcattagccatgggaactgcgggggcaatcgagagagtgaggatagcacatcaattggactagcttattgcattttattgagacgctactcaggtcgctgactgatcaggcgctccggggttcaattctactcagtgatcaaaaagcggcgagggatgagtactgaaacgaaaagggaagaccaggaaattgcatagatcgctttgatatcaaattaaccagagtaatgcatcttcggactaagttcgttttccccatttcttcgcatgtaaatctgtcaaggcccaatttgcagagagataatcaatgggcgaatcggaaatccagtcgcttatttccttcgtccttagtagtcgccaaatagttcgtcttttcgttgtccgtcatagcgttccatttcttgtcccggctttgattgcgccagacatagtataccttggtcaacaagtatatgaacacgttggaaacaacgagtcccaccagagtaccattgcctctccggtagcggggagcatcatctgatccaaattagaataccgagcaaatgtaaaaaagatgaggaatttcatgacctaccagcgcgatagatattggaagcaataatccccgacgattggacacacatgttatacatggcagccgagaccgtgcgggatcggacagtgtttgagttgcgggagttccagttgacttgaatagcatgcgctgtgattttgtgagccatgatttcaagcagatttgaacaggtgagcttaccatttggatatgacaatagcagagttatcaccgcccacacgcaccacttgttcgcggtgttgatgtcgatcacatataaatagaccaagaaaggaagcatccatatttgcccgatcgtagacaccaaagtcaattggttacaaatctccgatgcatatgtgaggagtaggaggaagataatagacagcacttcgctaggaatgaccaagagatttgtcacgaaagtgccgaatccgaggcctttcagagtcagagttaggtattgcttgggggtcaccactggtgtttggaaggtaagtccgatgatgtataacggccagagatcatagtccttgagacttttccagagtagtttaggtgtaataggttctcgattgtgcatggttcctttgcttgggtcatcacgaattactcgattgacgatgatggtttcctctctgtcaatcctgtcaataacgatccggtttgctataagaagggagataacttaccgggcagtgaaccaacccgatttaccccgagaccaattagcagtctggcatggtcctggtggcatcaggatatatgcagatagaccaaatagaagtgtcagaaggccctgtcttcgatgtgagtaatgcgccgattgcaatcaaatttaaatgaggtggctactcacctccagcaaaaacagccagcgccatcccgattgaccttgcacaccacgaagatgtaaaaatccgaatgcgaggaatgcagcaagaatatccgcaatattcatggccgtccaaaagaaaccgagtcgtaaagacagctcatggtgtttataaaagtaggacagatacaatatcacctttgagtctgttagcagtgacccgtaaccagaacacgaataacctacatctgggataaacccgccttgcaaaatacccagcagggcgcggcacaagaggaaagtcgttctcccattcagaccatactgtgccatggcaactgcagaccaaagaaccatttgggtgggaatccaccgatcaggtccaacccatttgctgacgagctgagagggaagctcggcactgaggaatgagagcttgaacaccgtatttccaagattgtagtctggagatagaaattattattgtcagccctagaatatcataagataaaaagataactccgatgctttatttaccatttgtggtcatgttcaactcgggaagcatgttgtcggttagagcttgtgacagattcgaccgatccaactccaagcacatgaacatgagacacgcaaataccatgatacggagatcgatttttcggatcaatttgtattcctcgttccatgtccaccgagccgaggtgtcaaatcggtgaagattctcccagtcggctcgaggttgatattccttcgcggtgtccgggttgtcaaaaacggacggctgagtcgcaattgcttcggggttgtagtctttgcctcgctgaaaccaaaaccgacgttcatctcctggctcacccaacggcgggatgtcaagactggtagatgagtctgtatttgtccctttgagtactgttatagactcatccgggcctttctttgtgctgtatacagtggacatcttgacaatccaaagccaatgtgggtgaattgtcagaataatggaacctgtcgttctacctttaataaatttggattatctggactccttttatacatccctgcagcgacgatccaatcggggtatattgccttgaacatgaatttgctgataagagaccacttgaaactggcttgcatcatgaagccaagtatggaacaattcttctggtgtgttgtgagaggttcgggttcagggccaagaaaggtcaagagggttagtgggaatggcatcttgatggctgaatatcacatcattctgtcgaaaaaccacatcttgcccagtctaaaagcaaactagaattatgttcaaatcagctactgaggtccattgaacagctgcgtttaccgagaaagacaaattgccaaataccttgagattattttgtttctctgcaaaactactcatcggtgaacggcaccacaaatagaacatatatctcatattgatcgcagcgtggaagcctgagaccagttataaggcaggaccttatccattgtagctacttcatgatgtcgtttcatcgatgatgcgaattggaaccctcaggagcgatttcaagcgatattgacagaccaatcaatctacgcgtctaagatggacagcaagtccggaaagcgtgattttgcctttcttagtcttggtatcgtctgtattatccacttcgatcctaccgtccttggggtggcaagcttcatattattcgaaatttggtgggcgccctataataaaaatgggggacagggcaaatctcatcctttaatctcagaagaatcatgatagaagaactctcgacgtatatttacttaggggtccatttgagtatgacttcgcttttcaccaagtctaccttatggtgtcattggcccagtccgtcgtcttcggaggtagccatacgtcctcggctttttgattttcataacaattgagagaacgccaggtaaagactataacattgcggatctataaagctacggaaaggcttcaagaaatctaccgcggatcgcttttcgtgactcaagatctagctcccagaattcttctgcgcttagaaactccctggggacttagaccacatacgtgacataacctccggtcgatattatcttcgccttgctttccatcttgataagcaaggcaatcggggataacatcgcattccaatctcttgagcgctttcagggtcgtcaattcaacgtgcgactgtggcttagaagcctgatttcgtcgaatctgagggctctgatattgagtgccaataacaaaaatttgaagatagattttccttgcgatggccaataaacttagcagttgtgaacggaagtccaaggtcaccggtaacatcctgctgcgtcgtcaattgagatcgtccagagagcttattactatcgatggcccaggtttggcggggcaggtggagaggcggctcggatggtgggtggatcgagagtgacgtccgtgccttcgaggccgcacaggaacgaagcggttttgggaatgttcatgctggcttgatgagttttggaacgatggacatattcttttggcgaatgaaagcctagtagagctggcgtttggataggagtaaagaagacgagagttgttgatgggaaaaatgatcatccactaaccggccccctgaaatttttcgagtaatcactgagcgagcagcgagccaatcatgctctctgatttctcagtgagcggtcatttggcatctctgatatgtcacctgttggagctgagcaggttactcggctgtcctgaccctgagcgccctcatgaagcggcagctaagaaaggaaagccccggcagaggaaagattgtacgaagaggtcccgaggtacatagtccgtcggctaagcgttggtgacttccctttttgttgcgatgggccggaccctatgtacatggcgtgcttgagtgcggagtagatgtgcatatgtacatccagccaacaaatagtgaaggaaaataatctagaagtccaactagttatttcggattgatcagattcagcacatcttccggctttaactgctgtaggaatagtgtcgtttgtaatcaagattctactatgttgcaacctctagtagatatgatcccatcacggtgacatttccagatggcggcatgtcagacaattcctgggggaaatgacgaatatcaactgtgacagcacaagttgactgttatctatcaagaagatcaacatctaagacgtgctttcgctctaactgtgcgacagcaatgttccagaactgcggggctacgataatgagggctgggcaccgcagcagacagatgtcgcaagcggataatcggcaatacccagtatgtcacggagtataagattgatacctggtcccagctttcatcttctagcatcaagcaacgctatccaacaactgctgtatccaacacccttaccatggcatccgctgtcacccaaaccgcacctacggtggttcccgttgtggaggataagattacgctcacgggtctcgcacgtgaacctctcaagtccagcggaactctcgatgctttcgaatactttgatgtcactccagtcattgggcgcgaattcccaaatgccaacttgaaggacttcctgcgcgcccccaattccgatgatctgcttagggatcttgccctaaccagtaagtcgcatccgtggctatgcgtgacagatagagctgacatgatatcccagtctcgcaacgaggagtggtattcttccggaagcaagatggtctagacaatgacctgcaaaaggagcttgtccaacgacttggtgaactctcaggcaagccaagcacatctggactgcatatccacccagtagcaaactcgggtcgggaacacagcgtcaaggacgatgagattagtgtgatcagctccgcaagccgggaaaagctgtacgaaaccagaaacaaacggaaacagactgcgcgcagagagtggcacagtgacatcacctttgagcccattcctagtgattatactctcttgcgtcttaccgagcttccgaaaaccggtggtggtaagacctcattgcgtcctctctatgagatagtccagggacactaatcctcttctagacacattgtgggcctcaggatacgaggtttacgatcgcatctccgaaccataccagaaattcctggagagcttgaccgcaacctatgcgcaacccggcttcaacgaagttgccaagcgcaacaatttcacaattcaccttggtcctcgtggtgcaccggaaaacgtcggagaagatctcattgctgagcaccctgtcatccgtaccaaccctgtcaccggttggaagagtgtctttgcagtcggtacgcacgtgcagaaggtcaacggtgtctccgaagaggagagccgccatcttctcgactggtttgtatctctcattgttgagaaccacgacctgcaggtgcgcaatcgctggcagaaccctaacgatctcggtatgaccccccggtgaaattttgtgatggccgtatctgactgttggtatagctatttgggataaccgatcggtataccacgcagcgacttgggattatgacggtctcggtccacgcactggacatcgtactgttgggctcggagagaggccatatctggaccccaagagcattggaagacgggaggcactctccaagagcgaataggtatttttataatccgcattggaagatcggccttctcgccatgcaatttaaatgaaactcttgttcttgaacacgattcatatgtgcgacacatagtatccaatgtctacatgcatttcctcaaaaggttattccttgggacaatccacccatgggtccatttcaggccttgagacgcggtgacctcagtttcctagtacgttaatatttaatttcctgacctcgcgaacaacttgataaaatggcggatgaagttagaaaggagttcggagctagaaaatccccgatcatagcaagattctttacacaaattcaatcaaaaatccaaatatagaaggcaataaaagagctgtgctgaagccatatcagtttatgtacatcaagccggctgggagctgacaggtgaccataccatgcaaacagagactattcccagggctacataggaggtaaatcaccaaaagacaagtttgggtcccggattctagaacccttcggaataatactttctcccagcactctcatgttttctatccgtaccctccggggggaagtcacgtaaatatgggccttggtacctcctgggttgaggaagagtgagcaatggcatggatctggctttgtctcgccacttcctgtcacggtggttgaatcgtagcccctgtagaataattaggatactttatggatgtgatcgagcctaggatttaatatggcctcatacaagatgcggacagaggttttccctatccttcgagcacatgcgacagccagttgctcggtggcactcttcaatacattcaattccgcctggtaggttgcagcgcttccaggtaggttgaaaattgcgtttgggctccaaaagaaactgataccgtcaagggtacccgaataggactcggcggggatggtgttctgaagagacatggtagaggtgagaatattaacgagataaaatgccttaggtcttttggatgtgaaaacagagagtcaagattgatggttcctcttggatgatgtctccaacgcctatatatatatatatatatatatgtagaaagtctagccagcaggggccattgaggtcaaagataaaccccgctactttccctcttagagatacgttgcatagccaatggatacgcgccgtacttgaagatcatcatgtcagagctatcagagagcttttgctttccaatcagtttagtcgcacggtactacaaagtacaagtgtttcatatctcaagaattaatcattcaaatcccagagcattagtcttattgggtatagcttgttttcgcgtgctgctttgatagtgcaattatgctcgtaagcgctaggacaggacaggcccgagtttatttctgtcagtacgtatgtattgctacatcgtaatctatttttatcttgttttatcttattttaatttgatctcattaggtttccttttgactgggggcggatcggcatcgcatggctgcgagtaacttttctctgcgactgttcgttggagaacatagtattcgccccatttgcgattcaactttcatttcaacgttgtctccgattaatgaaagggttctctaaacgcccaagaatgtaaatgtgattgttagggtttcaagtctcaagaaaaggtcgatttaaaattacacaatccctgggaccacgaccattttgaatctgaagaaaaaaacctcactattaaaccgattgctcgccgacctcgggagcattgaatcgtgtcattggttgtcccttaagactgtcaagagaatcatcatgtttcagcgaagcgccactagttctcacaagtacgaacagaagcggcaggaattaaaatagacagcggtgatcctgggcccaagcgagtggtgacatccagaaagaagggattttgggctcagcgcatgaagttgataatttgcaggagccaactatcactgggcggtgtgacgaattggcacttatacaacctgatctccttctgccttaagactcacctaatcttcttcattattcatctactctgccatcgacacattcatctgaaatggccaatactgaagcttcccctgaaaacacgacagattttggtgactttgtgaaggatgaagaagaggaacttgatctcgaagagcttgttgagccatggtataggtacgacacagaggataaccaacatttcctctatcctattcaccttggagaagtgctcaacgacaggtacctggttgaacataaacttggctttggtggtggctcaaccgtctggatggcatttgacctacaagacaagagaaacgtggcccttaaagtcatggccctagggcaatggggcgacaatgaaactcgaatccaggatgagatcatcaaaacagtacaggatacttctcgcctggttatatatactgcgactttctttctaccccgagacgataaaagttgccatagggtcttggtgttccctgtgaaagggccatccatctgtactcttaccttgcaaaagattcccatggcctctcgcatgtttgctgctcggcaattactagggactgtggcaagcttacaccaagctggaatcatacatcgcggtgagtcgacattctcttgtttgattttcttttatactgagaaaaatgttatagatttgaatgcaaggaactgtatgtggggaatagctcctttcgatgatcttagcagaagcgctaagtatgaattactcggtcggcctttgaagcaaacaataccatttgtcgatctgtggaaaaagggcgagcttgtgagccctatcaaatttcccgaagaccgtcgcacagatgaattctatctctgtgattttggtttagcaaagaaagtaggcgatctcactagccaacgtggctacccacctatgcattattgctctccagatcgacttcataagcaagagccaagttttgcttgcgacatgtggagctatatggctgttttctctatgctctaccttgaatttcctccgtttcccacatttatcgaaggtggagttgtgagtggtatggttgaatgcttaggcccactacctaagcagtggaaaggtctctacaaatactccgacggccttgactcatggtatgatcagtctcagtctcctgatctagagcatgaccttgctgcgaaaattgcttatttccgtcccgattctgatccggtcgagcggcagcatgtgctttcggtcatgtcgaaagtatttatctacgacccagaaaagcggctgaccgcagtagaacttttgcgagatccttcattcagagccatcatggaccggtacaagtgctgagactcgagcactcgaagagcatttgcattttctagccacggagcgcaagaaataatctgcctggattgaaatagcttgagtcaagagcgggacgtgatgagcaaacaggtgtcaagctaaaaaccctcgtactgctgtcccgttagctgccaccgaagtcaagccgggatccctcgcgagtcctgcgatgcaatcggggccacctttgtctcagctatctaaacactgtcgctccaagaatacctgagtatctatggtctcgtttatgataacgataatcagcacgtgggctatctcatatttgtttccacggacaatgccgccaagactaagcgtgccgagcgcaagggtaatagcgcgaatcactactcgatacatgaaaagaccaggggaaaaagcatcaaagtacaacataatactattatctgaggcgcctcggtccaatctttagtacgactgttttacccagtgccgttaccgttctggctcctctcaatctcttctcttcctgggttctcccttcaacggtagacatgcgctgtagtaatttgctgtgtttatctaaaaggagtaatcttttgttcaatcacatcccgacccaccatataagttttggctacttttatgtatacatgagcttgatcaagttttatacaatccaacctccgaagacgtcggataagacgatcttatcatagaaactcccgcggggtcttattggctgataagcacctttctcgctggctgttgcctcgtttaagataagcataaagcatgccactcccaagtccacatataaatgtctggtgagcccgacgaagtaacacaaaccgattttaaattcattatccagacacagaacataatgcatcttgctattcctcccactcctattcgcaatcccgaaaagggcttcaagacacaccctaagaagacacgaactgagtctatctcagcaattgagaccgaatctgcacaaccctcttccgatggctcgtcagaaaagtcccttcggtccattatcaaaggtgagttatgtatgacttatttttctaccttcgcttacagtattatagcctttgtttctcgcaccagaatgtgaagacggcggtatctggcagaccaaacatggtctttgattgatttactttcttttgttatatatctggcctctcatataccttattcccctctcgctcttgtggacttctcattggtgtgtgttttacaagtaattactatactcctatcatactcgttgagcctttttatcacaattcagtgcatgacctactcctacttaccaaagaccgggtatgtgtcaaatgccatcaactgcacttgattctcacagctcctcaatattgtcgaggtcaatataccagctcaacttgaggaatcactatccgatgaggatgaggaaacccattcgccagggtcagactccccttcatcgccccagtcccaggcggcgccagcaagaatggtcctaatcccagtaatacagttcatagtcatcgtatcggaagttggatgcttgtggcacagaattttgaatactttgaggcttggggtttgttttgcaatctcagtacccgtcgcaatcatctcactgtataggctcaaggctctccttggctcattacagtgatgactaaatcctgcggagaatcgatcgacatcttggagactgagattgatgataatactctcaatctgcaacggcatagcactgtcgccctgccgaaattcaaaaatctgtggacaaattctacacatgcgtaagcgcacagacctcagtgaagggatctgaagcgccagctgaggacgaatatgtatggcgctgttcatttctgatccgtaggtaccaggccgctcaagaattgagttgggtcccatgatgaaatatattgctggcgaggaatcagcggattgattgggtcgaagtggctgcggacacgtaaagtgaaagatgttaaatgattgctccgtttagccaatgaagtgagtatttcattgaatttcgcgagatcctgctcagcgggccagtccttggggctatgcgcatcaatggtgagctgtcgcaaaaacgccctcaggtttgaatacacgttttcgggggcatgtaccaactgagtcgcactcagcttcaggtcctctagcaggagcagctttgcaatctgataccacaacttgcagaccaacaaacagcaaacttcctgtttgcgaagctgatcgctacctataaatcgaatgatgatacatagtatctcggatggtagggtttgcagtgtcattggaggaatgtgtggagaagcagagtaaccgcgagtttcaagagataccaagacaaacgcacaaactgcacaaatgctgggtggccggcaaggcggtcacccagtgggtccagatcctactagttagcagatcttagatcttagatctttgaatctttaaatgtttaatctttggactgtccaatatttcattagtcttcagttttaagggagatcgcttattatcttggccgtaatcttgtttccacagtatgcagaggatgtacatccagagcctgcatatacagatgcaacagaatccgacaggtagctagttccgtccctcctcttctttcctctcctgtccgtccatcatcattctaccagaatctctcttgtctttctcatacgagttcatccaataagtagatctctattagcaaatcatccgtcgatttctaaaaggcaaacaagaaatttgctcaatatgttagcagacttgaaactttttactctcacaatcatcccttacagtgggtccttctttgcacatgtaactcttgacagcacctattcttactcgggaaccgttggcagacttgaagtgaagtgagattaaaagaatgcaaataacatatctcaactcgtaattctgttcgcacagtataacttgtccactcctcaatcttgttgtacccgttacgggtgtatattttcctgccttcctcgtttatctaggcagttgcaattgctttccaactcgagaagtgagaaagcggagctcaaatatgctcacttcctactttagccgagcgtccagctgatttagataatcctgaatggtgactttctctggatcggtggtcataaaagcatgagcgatatactcatccgctatcaaactcgtcagctccacccactttcgtgatgcggaataaattgacataccgtgggttttcaactcattccaagcatcaacaatcgttttcagctccctgtctacaagtagcatgggcggaatctcctgcttgtcactttcaaataagtcgtagactgtagtaaggtcggcggccatcagagcccaagcgccctgaagcagctcgagcgtttcgacagcaggtccaatcacattgatgatatctgtgacttgggccttggaggcaggtaagtcactggtgcaaaacaactcagttggcaaaaggctgtacttactcccatggattgtatatcgccttgtagccgaacagcaatctgtagcttttctacatttgcatcgatcgtctcttgaatctttttcatgctcgcctccagccgtttgatgtcactttcggcgagaatatcaactgtgacaccagcaatggtgccaatgaacggtctgtttttgatgactttaatatctaacctctggtttgtagggtacccataaacttacatccagacgtagtaggcagtatctttgatcttatcgtggtctgcgagtatgtgaaggagttagtagtgcattctagcgaggtaaaggctagctcttcacctctgtcaatagccacttgtaggtcctggatattcttcctttcctccgcaataacagccgtcaaatgctctatatcattaccctcctcctcaagaagcgattttaggctcttttcatcgccctcgagagtagactcgtacgccttacagtcatcatgaaactgtttcaaggcactcagggtctctgcgattttgtcctggatagatgaaatcttcttctcctcgccgttgatagcacctttgatactcgattccaaatcatcaagagtcttttgatcgggggatgccttttccatttcgtcgttatactgtccaatccattctaacatgcctcgataatatgagctgtcgcttgttccccctgctaatgtggcatatgttttgatcgtacccgagaggtccacaaggccattccaggtaacttcctggaaggtggtacaactgctcgacacctaatatgcgagtgggagattagcttgtatattctgtccagccagctagttacattgtgcacgagctttgacttccatacatacctcggtataggttccgagtaggttgtccacctctttccaaaccttgtcactcatctcgttggtgtcagtgagacccaagactctgatgtaggtctcgcggtcggttgggagcaactttccagtccataggaatctactgagagctaccatattttcatcatccaagaggaatgtcttgtcgtcatcctgctcggcgctgaaagcagtaatcttcttcgttttgttgtcaagaaataggccctttggataccagacactcgggtcattgatgggctttgagggatcgaagctggtcatgattgtcaggataaaggctcaatgtgcgttgataaatcctatattgaggaaaggtgaagaaatgctatctcaaacagtgtcgacgactctgaaatagaaggagacgaaataatagcttacatggctttcctttataccctggtttctggatggctacgttcggtcattttctcaaatggcggtctatctcctctacagtcgtagataccaacacgtgcttctctctgcctgctgtccttctttctggatgatgagctcataggttcggagaacacggtcatatgataaggagtaaataatgaaactgcatgtactatatgaactcagcttcgggtatctatacagacaatgcgggccgagcccttgcattgcgctattgttaatacttacatcttctaaaagcaggatatgtgtatgttgatcattggggggaaagaggggggtagtatcaaggtcgtgaaacctgcatcgggaactccgacaatgcatgcagggatcgacagtggatttcgcgtaatgactcgacgacctcgccaggtatccatctgatatagatctagcactttggatcaactcatggctaattatcgatgacgaatttcttccaagaggcggagtttggggtaattttgatttccgatatgtgcagacggagctttaaccaatttacagaagatcggttcataagcatcagattcgtagagccacaagtcataccgagctacgaataaacatccttgttcaatccaatttagtcctacaaaccaatacttcttaatccgaacctctactttatgttgacttttaaagtctttgtggcccaacaataaaccaaatcacacagtatttattgatttcaagtattatctcattaaaattgaattattatagctcagaacagagtatgtagtaataggtagtttcgattcatcgcgcatatctaggcatcggcagcaagcaatgtgtcacaagttctgatatccttgtaaggcccgcatgtgagttgggactagcccaatgaacgaatacgggaatgcagcttgcaaaagcaattttcaggctcctctgctagccatgctgtactccgtacgactctccacgatgcatgcatcttcttggggcgatagtaaaagccttggcattctgcctatcaggctggagtgtcattatcgaatccgtgacgttgagcgatttactggtcctatgtttgcgactgcggattgattacgcctcttcacacctaggacatcaggtgttccatttgcctactagccaaaatgattcgtgctccatggagaaataacccgaccgtccttccttcctataaaaccctgcctgctgtttgctattcttgtcaaattcaatatcagttctaattcacttcctcggagaagttgtcaatatgaccaatatcgcaccccaaccgagcaatccaagccaatggcaagagtggtatgccacgctggacgatgtgctcgatattcccctgcaagcagcagactatgtgaacgaaagttcggtaataaatctagcgcaccctccaggtattaacctatttgcgctatcaactgattccagtgacagaaacttgccacccaccgaggcattctccttgatgcacccactgtcctcgatttttcgatgcacaacctgtacatctatgctgatgttcttgtcttcccggcgagcgaaatcacaatttctcctgctgcaagcggtattgtgcagatcctagcccgagttctcactgctgcggctccaatcactctattgattccccctggtgatgcggccacatgtgcaatctcgatctatgcgccagttttagaccagccgatatcagtccgcacgggtgattctaagccgataactctggaactcggcccaacgacagccaacgttggtgttatcctaaccttttctggcggagaggtgacggccgactaccagaaaagataccctacagataatcaccccgaactgcaggccagtctagagactgaattgcgcaatgctctatctgggttttggaaaaatagttcggttggcatttcaatctgcgcctatgttgcagctatcactcacaatcagaaggcctattcaatgctgaatactcaggccgcggcgttgggtcagcaactcgcagggcgagcaattgctggtccaaatatgagctacgcacctacattgcctcttgacacatacgagaagactgcaaagttagcattagctgccgcatctgaatttgacgaagaataccgaaacttccaggacaaggcggagtcgctggaaattcagatccaggcgtggaaggttatgctatctcaagccattgccaatcaaaccatgcggatcaacttgcgtgactcggcatttgacaaatatcagtcagctgccaagtctgcagcctcttgtgagacgcagttccggtatgagaatgatgccgtgaagagcgccgagatacaatttcaacttggaattgcggaatgggagttcaatcaggagcttaaagctgtatttgagatattcaaggctgttatcagtaagtcggtcaccttctgcttattctatctatcagtttagtcatgcgattatccaggcttacatgatatagcttttgcagtcaatatcggcgagctgtgtatcggagaccctgctgcagctggcggagcagagaaagccgtggatggcgccgttgaggctgttgaggaagcagaaaagattaccggccagatcgaaaagatcatatcatcgataacattggagaatctgggaaaagctgcaaaggctctatacaaattgtatccgtcggtggtccaggttgtggatgcggtaaaggctctcgagtccaattccgacaccgagatcccttccatgggggatatatctggcacgacagagggtgacgctgattctgctgctattgtgacactagcggcatgggatgtatggattctcgaatcagatcaccagatggagtttgcggtgaagaatgagattgggggtgccagtgagtatcagcttgcattgcggaagcatgcgatcaatggaaagcaactggcccagacccaggctgaagctatcaaggctgggtatgaatatgtccaggctcaaatggaagtcattgtctgcgcaaagcaggtcaatgatcttcagggcttgatagatgagtatacggggcaggaggatatctacctacaagctaaagttcagttatatgatcggctaatggcacttcgaacgggtgttgtgattgaactgcagaacatggtttgggcatatcgatactgggcgctcgcagagagtactctagtcctcgatatcatgaagtcagtcgacgagtacaacagcgatctgtacaccattgcacttgccatggagacaatcgacggacaatacggcagtgattaccaaggtaattagcttatccacccctctctagggctaactgaccgttctgttcgggtagactttgggtacgatcacaagtccgaatacgtatgtactcttgatccttgtgagggttgccaccactgactggcacgacggtagcttcccttggactttggctctttgctgctcgagggcctcactagtgaaaggcacaccggtagctttaccctcgcaccggaagaagccttagccggtcaattcgttgagggctcccactaccgactgagtagcttagacctgactctcatcggagcacgccccaaaagcgaatttctggaagacggtgtagtgaaggtttctttggagatcaccacatcgggaatatacagcgatatcaacaaggatcaggtctttcactttgccagcgtcccctcactcgttcgttgttcttatcagctgaatgaagagggcgacagagggttgacattggaatatcctgttttcaaaaccgaaaaccatgccgagcccacaccttttacacagtggcagataaagctattgcatcctgagagggttgatttgagtggattgacagggattaatttgaattggaaaggccacgttcgttttgatccgacgagacgatctaaagaaatatcgatggaggcttgagatagtagcaagatagtggatagttacctggaatttgtatgtaagccagtaacaaaattaagtcacttttttcatatcaactgctttatcgtcaaggggctaaattctgtaggaattaggtagaatatacgattttttctgatcaaaatgaatgtttttttttgactatgtagaccagaagtgggcagaatatatggcagaaattatggcacccaatctggaaggcggtactaaattttcggggggacaacccgagaaaattgcctgcgctatgaactagacagacgagacaatcatctgcgacttgagctacgaaactctttgttctctctcaaccatatgcctctgcaatctttaatagtcagtctatgatgtatttgaaaattttgtattgacgattgcacagaacaaaaatttgaagctataggggattaaggcaacttaggcataattggttaggcaaaggaaacaagactacatctgtcaatctgacccataaactccatacctcagccactgatatgattccttgaacttttggactgcatgtgagaaatcaggtcagcatccgtgaacaatgacagacagaaggatttcgtcataccttctactgccagatcactccacatctccagtagttcgttttcttttaggttgagaagaggcccaggccccggctcggtgttctcggtgatgtactcagtcagtgcagtgagatcattgaatatattgtatgccgcacctaacgcatacttgtcaatctcaaacccagcaactcgacaggggatgagcctaccgacagcgagctgcaggtttgccaacgaggcacttgagtcattttgcatgttctggtttgcgatgattccctattgaatctcactgttagaaacagcgcaaaactgaaggagcggttatatgcatgtggatttatcgaacttgcattcaggatatccagtgctctgcagtcactttcgaaaccctcctgtccatttatgtcaccttcgtgacacttgcggagtcggtcgatagtgtcttgtcgccctagttcctcaccgacttgtttgaccagcttttgtccctcggttacgtttccgatagctgccacaaggttgtcggttgtgctcgtgcactgtttagacaggccatttactttgtccaatcggtctttgatctttgcctgaacctctgcacgcagactctcgttgtctgattcatcgtcgtaaagccttccgaggtcattgaatatctcatctgttttgaacaaagcaaaaagactcagcttaagaaaaaaccaaggaatcaaaaatccgggctattcctaccataatcctcttttgctgtagccgaaagtttgagaatgtagtcacagatatcccccacagaacgatatccgccctaaagcaaacgattagattgattggcattgtcaattatcttttccatacctcaagattcatagactggctggtaatctatcgacgtgtcagtaggtgggtgtgagaaaaggtcagggataggcctgtactgtgtaaaagtgttccatgaccggaattagcaggtctacatacagctataggtatctctagattagttgggatcaaagggattagtttggtagtccttattttacctcttgccttccctgctctgtgaatggcactctatagtcaagcccagaatcattatagggtaaattctgtgttgcctgggttgcctgttggagcttgaagaaactcgggccgtcacagcagaaggttttgctgttggtgagtagatcccttgggctgaggaaggattcatcgaacgacatctctgtttttcaaaagtagttgctggattgaacattcgaaaagatagaagacgaacgactcatttatatatatcttcaacgacagaaaatacaaggttcatttgttggactatgcacatatcttcgaggaacaatgagtaacgcatgataaatgcaccgcgatatgattttattatgcatgtaagtctgcccaagatgcaactttctcctcaatacggtaatctgcatgcatacgtgaacccctctgcgtctgcgttgatgatcgtgtaactgtacggaccgtcgtacggatttgaaatgacctatgacagcataggtgagtgttcaagtctacaaaaaggaccattttatcaaccatgagctctatgtcggtagccaacagcgtctatagtcggaaaatatcaaggttgttaagtggtcaagccagcgtaaaaacgccgttttccacttaataacagctctgctttgcccatattcagaattcttagaatttaatatcgtatctctcgttgcctagtgtttctagttttacttggtccacgaagccagagttgaaggccagtgtaatgctcttctctccttgtcgctgtttgatgcttcaaatgaatccattctacgtctggaatcgactacttctggggcttttaggatattaaaagtatatcaacacacaattaattattcgatatagttttactgtccataatggatgaccgcagctgcggatcgggctatttaaggcccgagaatggtactccatacgtagagtgacttggctacgatgcacatgcgttgttctctttgatctcctgtatttccctcaaattccctactctttgtcattctcctagcccctatttgcaaaactcagactagattgaaaaattctctattgaaatgggttctatcgaaaaacactggatatcgtttcaagacatgaaccctgagagcaaccacaaagaagataaaaaaagtcctcgaaacagctaatttcacccatctctgctctgaggcttcaaagatccgccaacgagaagagtccctagattcgctgatattcgccgctcaactagcccgctatgtctatgaacttagcactctccgatttagcaagatcggctgccgctcgtaccccgacgggtccgacgagcttgaaccatcatcattccaaatctcagattcttgggttggactccgtcgacctcattgaaatacttttatctattccgaaaaggccagacaagggaaatccacgaaaaacacaaaggcgaagcaaactgggaagcagccgtttggttcctcgaaaagtcgttgacatcgatggtaacggaggagcatgtatatggcccatttccattgtgtcatttggaccttcacttcaataatatgctcgttgatgaagatttcaacatcactgctatccttgactggagcaatatccagactgtgccgatggagcgttttgcctcaaacccggaatccattgctcctcctgccgcgccacaggagtttaagcaggcggtctttgacttccgcgatatttttgttgatgcgttagcaaaaattgaaggggagagcggtgcctcatcgtctgatggaggaattccattatcacggctgtttgcatcccccttgtctgaggtgctttttcgatgtacttgtagccctgcacggagagctatcttcgacgctcagctcactctctctctaacttatggtaaagatgctaagtgggaggatttcaagagattcttcaatgaccgtttggcgtgactcgccagttgaggaaggtgcattgcgaataggaatattatttctcgccaacataataaaaaatagaggcctactaaagccacaagtactacagcaatagattagaaactgtcaagaacaactggtattgatggctgttgaagctgaatgcaaactattgacattgtatgtcgagaaatcacaataccagagagaatgcaataatacatgacagtaagattcttaaagaagggtagggggattcatatccggtgagagggtagtttgtttcacccgctcaagagccgggactatgacatcgcccttggcagagttagtgatctggtccttgacggccgaaggattaggcgatgtgcctggtgtgcgttcgcccttgccatggcgctggatgagaccgttggtgatgccgagcacagagtcgacaatgacggcgtcgattccttcagagacttggtactgtagggattatgtggtaagacggttgtttgagatttctagggatgtgaaaagaccataacttacgtcgacgttcttgccctcattgttgagtgttccgtaagagacacacacaagaccggactctttgacaattcggactagtcgtgggcagaggaccagtggttcagcctgggtgacgattccaaggagattccaccgtgaggcgaaccgaatagcctcctgcaagctgctggcacggatgtcaccgaccggggaggcgcctgcgtcagtcaagaaaagaacggggatggaaggctgcttgaaagagagcagcagacagatgtccgggttgaagctggagaacagtatgtcgcggccgcctcctaggtcatacaccttggtcaagatggtgtcgacgaaggagttcagttccactgcgtatgtgtccatttcttcctcctcgctctcgtggagcatggggtattctgacgaccttggttagatcgacggaatagctgttcttgggaagctttagtaactcacttagttcaatattaaatccgacaggtttcgggatcttcctgaataattcctccagtgtggcgaatggtgcctgaatgtgctcgccgcgggtgttgcccttgaatcccttcttcttgaagtcgcgtgtgtgcttgatcttttcggtcaattcggccgggttgtactcggagccaccgaccgacattgagcgctggcgcgggccaagctcagattcctcgccgttagttttgacagatcccggcaatgaatgacggtaacgtccgatgcctaactcgaggaattgatcaagtgtcatggtatgaacaggcgcatctatacctgtctcgctgaccaggaagtcgtggtagatgacaggcacatggtctttcgtgagctgtacatcgaactcgacatatgaggcgcccaggttggctgcagcgatgaacgactccacagtattctcgcccaactgtaacgaattgcggccagccatattcttacctagtccacggtgtccaatgaccatggtggagctcatcgagcgccagtaggtctggttgcccgcgatagacattttcgggtgcttgaagggcgtgatgataaggaagttgaacgtcacagacccgatcacctcaagggtattcgcggcaacaatgggaacagtggaatcacctttgaggttgattcggtgcgacccgacagtgggcttgatgctagaaagcagagcgacaccccggccaacaatcttatccttcgatcctgcgtaggtggggatgaggtcgaaaagcagacgcaccttgctaggatcggtagtgtggaagacaattggctcggttgagatattgtcctgcacaggcaagtcaatcacctccggctcaccatgtgcaccgctagctgttatcaccatcgacaaagacgtatctagctgggtggcatgtgcattctccatcggaatgcggtcgaggctgactgtctcaagcggcttgcgcatgtccatagttcccagactgaccaagatcatgctctcatcggtgagatacctgtgtccaaaagtcttgataggttcagtggaccgtacgccaggacctccagaagttgggccaggcgcatttgaccggcgatcagtgagggacgactgagtcgggggcgaggaggaatcggaaccagtgaggtttggagtagacgatgaaaaatcaggctcagtggcaggagggccagggctaacttctgccaagcatcgggcgatgtcaagatggcctctgagggccgcgtgctccttagccgtccagccagaggagtcgaaacgctccacatctgcaccagcggaaaccagcattttggccacactcagagatccgtccacacaggcaatgaagagcggagtccaactatatgtgttttcagctagttctgtgtctgccttctggtcgtcgctaccatctagcagaatttgggcgcactcgtcacggccaaatcgggcggcaacgtgcaatgcagtttctccctgttcatcctggtaattgatatcgacaccagcatccaccagaagctggacaatgtcaatgaagttggccttggtcgctaataccaatactgcactagacttcgagacctgttttcttatgatgctccgcccctgcgagggaccatgctgtttttcggcatccaagagacaccgggtggttttggggtggccacccacaacactcaaatgaagcggggcccagccgtcattgtcctgccagagaggaccgtcgatcccatcgctgacatcgaacatgtcccattctttgagatgctcaatgatcacttcacaaacgaccttgaaaccatactgtgccgcatagtgcaatggagtgcgtccagcaaggtctttggccatcaaagactcacgctgatcagggcgcagcgagtctaagagaaattggaagtgaataacagcagaatcctcgcgacccagctgctggggcatgtgctcctctttgaccacggggcgcggcggttggagggtcggaggtgccgcgggtgtgatatagcgggtagtctccggagggaagttgagcaccattgacgccgcgggctcggcgtcagtcgtaggctggtcacgaccaatggaaatgaccagacggtgaaggcagttacgtctgttgatgtcatcgtcctcttctagggtgtccacccggttcaggagaagattcaggacagcacgagaacgatgaaggatagagcgctggatcagggttctgagaaccctaggataaaccgtgtctcccgcttcatctgcagtggccttcaaagtctcgagtagttcaaggaagacatgagtgtcatccttgcgcagggcatcatccacagcagtgagaatgctcgtaggcagattaagataaggcctagttgggccacgcttcaatgaaagggaagaatgggtggagctcgtgtcatcggatgccttgtcgtccgccttggactggtccgtaatgatggccatccaagcattgatgcgatcctgagactggaagacgcgctcattggaggcgaacggggcgggatcgaccttcgtctccagatagcgcttctgggcctgcgcaccaaccttcttgtccaacttcttggtgatcttgacgaagccacgtcgattgacttcaccataccattgtaagcggcgcaagtggtatcgcaggtccagcagggcctcgcgcaggtcatgccgatcctcgggctcgagagcatggcgaccatccattgagtagccatagcgctcctcgagcaacttcagacggcgggcgaagtcggaatatttcttgttgtagaaatgatcgacatcttcaacatttcggtcgaggttgtagaagaaacctataggcagcaacacaaacggcctggtcagaacagcgctcaaatgttcaagataataaattcaaggaaatgaagcattaaacttaccagccaaatccggctcctgtcccgatttgatctgctcagcagcagacttgatcagcttcttcagggccttgtacttgatgtaagagccgctccactcgggaaccgtgaactgcggcaaattgcggccgaatttcatactggcgagactaaaaagtccactagaaattcagttcagaaccacactcctttcaaatccacgctttatctgcaatttcgagttgtgtttgggctttccaatcgaagaaaattcggagtaagttcaacctgaatatcacgaggaagcgatcaggtgagcgggcgaacgcaggcaatggaagagatgaaccgcgccatcggaatgtgtgtgacagggaatatggagagggaatgtaaaaaggaaggtagaacgacaaagagacaaagctccaaagtgtacctgactgtacaaactgtacctgtctgggagtgtcggggagatgggagggatactttgcacacctagagaaagacgccgaggataaatcgagaggagaagaaccaaagagctcagaagttgagaaaagaaccttggaagagtccaggtgttctttaaagcttaggaaggcgaaccggttggaggtgtgcgcgctggactgaagatgatttgtcgatccacggggaaattctccacggtacggtcttataaatctccgccaagctacatcatatatcaaggtaccgaacactccgtactatatatacacagggacggagtacccatgtatgtattggatttgcggtgtggaatttcgtccgcaagctcacgaatatagtggattacttgtccaacgtcatacgaatgggagagaaaggataccacttgaccccccacatgcatgggatcggcgtcagttagtcattggccgatggaccctagattccctcgtatagaggtgttttgtgactttcgagagagggatcaagcatcatgtatcaacaaatacctggaatgcatataggaatgccgatgagagttcctaaaagcttgaatggctgaaagttcaaaggacccatacagggggagacccgtcacgaggtccgctacagaactacagaagcgccacagcctagttgggaattatctcgatagtcagctgttcaaatcagaggttagggggtaagatcaagccattcataattctatgagtgcaacctattgcactctgtgcgccgaattccatagattggacgcctcccttaggcgtcctaagaaaaaagcagtcgccaaatccgtcgctgtgctcatgatcaggggtcatctcagaaactcattaaaaagcatgaaatataagaggaaaatcgcaaaaactccactggatcagccagcccatcccaaagccacatgcgaatggaaaaaagtgaaaaaggaatctgctcgaaaacggaagacatcgaacggccatggccgctattcaatcagcggcttcaaggcctctaccccagcctgtagcaccgcttggttcttcgtcttcttgagacatgcagtgaggacatcaattcctcctgcggcgcgaacggcagctttagcccgggctccgatatcacctgtcgcaatgcaagtgaggttgcgtatgcagaccacacctcggtgagccaaggcatcgtcatcctcctggcacaatcccaataacagttcaactccccggggtcgatccaggacagctgctatggcggcatcgaactccgtcaacatcgcaagagccccgccggcagcccgtcgcgtcggagcgtcatcggcatcggtcagagccaacagaatgtgaaggcgttgggccgcttgcttggagccatctgcaaacttgataatgccagactcgcaagtcatcagattgcagaccagttcgcaagaagctcgctgaacttgagcattgctagacaaaagaagatcttccaccgcagaccagccttcccgtaccatgagttcgggtgcggagtcgtcatgcgggtacgaagcgagattcgtcaaagctaggagactctcaaatactgggagtagatcacaaggttggtcggccgagaacgaggcagtctcgggcgaagagaggagagagagcaggggacggacggcggatgtgacctggggaaatccagatgctgggaatacatgtgaaggatcaacagagatgaggatccgggccagcgcgtgtgatgcgatgcgtgttgtttcgttcctcacagggccagagctactctgcttcggggctgcaagggcgagtaacagcttcaccgcgccttgctgggccaatgttccacgggacttttggggtcttgtcaaggactgtagaatctttgccgtgagctcattggtggaagggtaggagactcggccgcactcaacgagcagagtcatgatgcctgcatcgataacggcggaacatcgcgacaggacagcttcctcttcatctcgaatatctatcgctggtgccttcacggtagaagggtctgcgtagttcttcaactgtgccatcttcttttgctcttcggataggttgggtaagaatttggtgagattcaaaacgactgtcaagccaccatagagcacggatgagtctttggtgttttgtttcatagccgcaatgaagttacgtaggaaaaccggatcattggcaagttgatccttgacggacggcttcaccgaggtataagccaatccttcgattgcgtgggagctgtgttcaaccttttgttcagacatcagtcccatgaatcgatgaaccagttcagactcgctgtcttgttccaagaccttaccgttgccagccgagggtttatcgggctcggatgcccgaatctttgccagggccactgcggctaattccgagcaattatcacttccattggtcaacatatgtgacaaccattctccaaatttctttgaaacaacctcgcggcacggacgattaatgcaagccgcattgagaagttccaacacgagagcttctaccttcttgcttttggtgtctcgcgatgcgattgggaggaggaagttcatgaattcgtccgacaagaagagattggcagctgcagagggagccacagggaagatggcggccaccgcagagaaagcaacgatgagatcgctgacacggcccttgccaagaatggacatgatcagtgtcaaaagcttcttctcgcctctttccttggcgacatcgagatattttgcagtagccagggtcgcctggcttcggacttctagcggcagccgattgtccagggatgagaggatcacctccaagccttcatcgtcgatcaaatgttctagttcaacggcgtggacagcgagtaaccgagtaattccctttaaagagcggccatcaagatcatggcccgattccatcaacttggcaatgaaaagctggaagagttcactctcgcagtgggatcgtgtttcctccgatgtccacacggtgggatccaacactactgtatcaagacacaccgctgctctatcaccccgatcatatatctcgtcgaagaatgctgtgacagaggtctggagctgtgtagaaaagtacaggcgaacactgacgttctgtcgtaccagcccagagatgatctcatcctgtgtcgtcgacagagattgcgggcgctgtgcgagcaacaacttcaggcattccaaagcgacgttttccggggatttcaggccgtcagtccggagataagtagcagcttctttgcccgcgctttcatcattgtgtaaggtatatcggcggcaaagatcgagaagttggtgaccgtctttgtcttcatgctgaactttcagaaaggcggctttcacttgaggattttcgggggcgatcgcaagagcttctctaagatttcgggaagcagcctattggagctgcatatcagtattccgctagcttccattgagaggtgttcaagaaatagatcacctacctctcggtggcccgcgtcgaccagttcgacagcctctcgggccaggtttacagcgcgctcttcgccctttgcttgaaccattgcaggggtgcgcaagagaaggggccaaaaatgaagattccagttgtcggatcgagctaggagggttaaagtggatgggagggcctttttttttcctgggtgaggggagtgcggagcggagagaaatagcgataaggtgggaaacagacaaccgctttttatggggaaggggggaaaaggaggtcttggaagaagaaaagcgtcgaaatattagaattttatttttgtttcggtttgccgcgctggcctgttcgaattcctaaaatgacaccatagacctttccccgtacatcgatgtactccgtaataatataccgaatcttacagttccgcgcccttttccttcacgaatccccattatcaattggtccgataagacaccaaccacagcgacgaaccccgtcacgttgtcgataagcaaatactcagcttagtccttttcgtcttttggtgtgacctcgcaagtcaacattccaaggtctccgaagagatatcctgtggcctccggtgtgcgggaacccatttttatacaactgccgtgaacagtagaaaggcatcttggaacccagatatgtacatcacaggcactagtttcatcttggcgcattcaagggatatatgccaagagaaaccatatcctttctttcaaatcggctgaaaacagagcatctttcaaccaaagttgctcagacattcaaggtaatttcagtcacccacggcttcgcggtgtgggattcaatccgattggagtgttggttctcccgagatcggtctgcctgtgagtcagtcgaagatcccgcagagtcaatttagtatgaggatgtaaaaggatgcaattcaacgacgtaggttggagatatatattggaaacagatataggacagctatagttgttgttatcaccccgtgaccagcttatcgcttcaagatcctcgacaggtacctagagcttggacttcaaagttaattccggctgtatgtgcagcacagggttctaaataaccagcctggcatcaatctgtgagcccagctcacaataatgaacaccaccttggaccgatcctccatttcaatacaatgaattccgtggatgcttcggagcattatgagttaggagctaccggtccgtattctctacacttacaagaggcgaacaactggctaaccatatcgacatccagacctctccccatccctgctcaccatagtcatcgacacaaacccacacgcctgggccgcactggaagactccctgccactctctaaagcaatcgccaacatcttagtcttcatcaacgcccacctagcatgcaactatgccaacgaagtcgccgtagtcgcatcgcacagtcaaaaagcagcatggctctacccatcccacgatgatccccgaaagcgcaccgccgatcgcgacggcgacgtcgtaatgaacggcgcaagcgacaccccagccccagaaacgaacaaataccgccccttccgcatcgtcgaagaacaagtcacccgcaatctcaaagaactaatggactcgatgactggcgacgatctacgcggcaacatgtccacgatgctagcgggcgcgctcaccctcggcctgagccacaccaaccgacgcacactcgcctgggcggaggagcacggcggcgccaacgccgaagatgcagcggccgatggcaacggcgggggcgggggcacatccacaaaccggtactcagcctcgaacgaggacgagcggctgcagagccgcatcttggttgtttctgtgagcgggtctaccgatgcggcccaccagtatatccctgtcatgaacagcatctttgcctgccagcgcttgagcatccccatcgatgtgtgcaagctcagtggcgatgcggtcttccttcagcaggcgtctgatgctaccaagggagtttatatggctctcgccgagccgcgaggcctgctgcagtatctgatgatggcgtttttgcctgatcagcgctcacgtcgtcatttggttcttccgactcgggtggatgtcgattttcgtgctgcttgcttttgtcatcgccgagtagttgatgttggcttcgtctgctccatttgtctcagtatcttctgcgagccgccccctggtggtgactgcatgacttgtggcacgcatctggatatcggagacaatgccaagcctgctctgttgccacggaaaaagaagaaaaagaagcgtgttaacggggcatccggaacgggaacgcccatgtcgacgcctacgccgggtccttgatatcttttctacgggaggtcatatcgttagagaaaaaaaaagataaccagatggtgacatctggctttatgatgtctgggttggtattactcctggatcacacattcgcttgatgctatgagcaacactacacgtagctggttcacaaggaagagatttgggacaattctcatcatactagtgtgaaacgaataggtacacacggggaggacagccgggaattttgaaacactctgatcacattgttggtgtcctatcttaaagaaggaggctatctagggagagcaagaaatatccgatgaagcaatcgctcgtcttgtcatcctgtcaccgtggaagacatcaatggtgtaaggccaaggaaaacaatggagaatcgggtataccaaggcagagatttcagatgggagagactggactgaggcagatacaggtgattgtgggcgaaagctacctcgtccatcgatgagtaccaacagaccataagtcagcagagcaaagaggcttcgctgcaagatagttgtagttcgcatccagagtgaattgcaattcttattacatatccttgtcagcatccacagcttatatcttcaacctaataatgaaacttacagttatttgcaaacctgattcgacaacctccctgggcaatggttcctcgcgagcctcgcgacatcagacaagaaggtctgttcgaattgctagacatcgaggcaatggcctgaaagatatgtttagcatccagtcctgcaccatggtaataatgaataatgaaagactcacaaaagagtcggtgttgtgggcaaagtagagttcgatgcccgaattgtttttcttcacaacgaccaccccaagggctccaaagaggacgctgttgctcacggcagggtgttctaacagacaagcaaacaaatgttagtgtttggagaattaaagcagcgaaaagaagaaaacggaccgttaaactcccttttcatccatgccctgatagcttcttcctccatcacctgggtaaaaaggccattgtcgcccatcttctgactgtaatacatcctttgcgcacaagtgcttgccgccagtgttgaggcaataagctctccagtcccagatgtaacaactgcacatgtagttccatccacatcagatgggtcttgtggaataacatgggtgccaatgccaattagggctgcaggaccaattcgacctcggtgcttcatgccaatgccaccagaagaagatcccgctgcaatgtttccatacttatcaatggcaatcgcgccaacagtgtctgtaatcgtatcctcgtcttgttcactatcggcggcatcggggctaccatcccgagataagaatgagggggagacaggttgcacaggtagctgtgagttcgcgagcttggcctttttctgacttttatgctccagcgatgctcccgggcgccccttcacatccgcaaaaaagcttggatcggcctggtttctgatttcttcgtctgctgcatggctggtcggatgagctcctgcttgagaagcacgctcgagacgttcaaggcgagtgtcaaggggagtcatgggccggcgaatccagggatcgatcatttcgccacgggtttcattttcataatcattgacttctgcggcccatacctgataacgctctagagcgacgggcgagatcaaggcttcatcgggcatgatcaccatgccatgttcccatgcaaagtccttggcaccttctccaaccaagaagttagggggcacccttgacatgcccagctgtacattagacttatcataaatcttccgagcaagcatgattggattcctgatgtctagcaggctcacgtgttaggcaagactttctgagcaagagacacaacaaacttactgggcacagctccaaccgctccatttagcccatgatgatcgacaattgaggcatcgccttcaacaaccccctttgcgttcaagttgcttccaaaccctgcatttgtaatcgggttatcttcaagcaccattatggctgcttcgacggcgtcaatggcggtgccaccactctttaagaatgccatagccttgagtgcggcgctaattcaattcacttattagactgtgtaaccatcaaataaaagaccgagactgacacttcacaggctttcaaatgcttgtgctcattctcgtggctgtggaagcccgccccagcatgaataaatatggcacaaacgccctcattcccggaggtttgcgacatcttgaaatggtcaacaagtgcaatttagggatcttccacgagattgtgcgcgatcgatcgaggtatcaggtcgaggtcaagagaagcgttgccgattaggcccgaatatccaaggcgataccttgaatcgggtatgtcgagaataccaagtttgccacgacgtcaagctaaagtgaagatatggatgaggcgcgcgaactggcaaaatcttggacgcgtctgcagtgtactcgcagattgttggatcgaaatgcaggtgctctttgtgagatcctcacttcaaattgaaacgactgaccgcctagttccagcctaaagaatcactgggaactaatgctgtaacgatatagtagactttgggcacggggagtgaagcgagagaagacaagagtctacggcgagaccatccgtgtcaaggtaagagaagaatacagataacgaagggcagcactatgcgtgccgtgcatcagaaatgataatcttggagtaataaaagactgaggggcaagagaggcttagggattgatgatgtgcgaatgaatagttagagaatattgcagatttagggaaactctcatagcactggtcgctcttgccattttggtctaatttcactttttgctgaaagtaagcagtacaattgccgtcaccagggcgacatacaatggatggttgtctgctttcttatgtacaaagtaggaaagacctgaggatattttgatacttcccggcacatgatgttgacgtgtgaccgacccccttaggtaatctgacctccgggcactgcatctccccccgccttgtctgcctgtcctcttggtctcttgaagtcagggcattttcggctaccaattgagatccagccgattctctcattattgtctcactctatacatcgcctacacttctttcaacccctcactgtattgtgatcgttcctaggcccaaccacccgccatggcgtcccaaacaccagccgttgtcatggacaagtaagttcacatctgcaagggtcaaagtaatatttcactgcttactctatacattttctagtggaactggctattctaagcttggtatgtttttctatggtggttaaagagctcgcgatcacggattaggctgacatgctacctccaatattccaggtttcgccggtaacgactccccgtcatttgtatttccgactgcaattgcaaccaaggctggtgctggaagtactggtagctctgggggcggccgacccccagtcgcaaacaagccctcgttcctaggcgctggcagtgggagctccaacctgtctgcaaagcgtggcacggaggacctggatttctttattggcgatgaagcgctggctgcgggcaatggtccaggatatgccgttaactacccgatccggcacggacagattgagaactgggaccacatggaacgattctggtcgaactcaatcttcaaatatctgcgcgtggagcccgaggaccactacttcctactcaccgaacctgtaaggcgactttatatgatagcagcgtgctgtgtttaaaattgtgaaacccctgacatttttggattatagcctctgaaccctcccgagaaccgcgagaacaccgccgaaatcatgttcgagtcgttcaactgcgccggtctttacattgctgtacaagcagtgctcgcccttgctgcctcatggacatcctcaaaggtgacggaccgatccctgactggaacggtcattgactcgggtgacggtgttacccacgttatccctgtcgccgagggctacgtcatcggatcctctatcaagagtatcccgattgccggacgagacatcacatatttcgtgcagagcttgttgcgtgaccgtggagagcccgatagcagcttaaagacagcagagaaagtgaaggaggagtactgttacgtcagccccgatattgtcaaggagttcgcacgttatgaccgcgagccagatcgcttcctgaagcacaccgtcactgcgccgaacgggcggagtgtaagtatcgacattggatacgaacgtttcctcgccccggagatcttcttcaaccccgaaatctactcgtccgacttcctcaccccgcttcccaatgttgttgacggcgtcatccagtcctcccccattgacgtccggagaggtctctataagaacattgtgctgtctggtggttctactctgtacaaagactttggccgtcgtctacagcgtgacattcgtcacttggtggatgcacgaatccgtgcctccgaggctcgcagcggtggcgcacggagtggtggtctcgatgttgccgttgtcactcacaagcgccagcgccatggtccctggttcgggggtagtctgctgggccagacgcctgagttccggagctactgccacactaaggcggagtatgacgagattggtcctagcattgtgcggcggtttgcgctgcttggtggcccgggaagctcgtaaggggaaaatgagtgaaccttatcattagatacttgtcaatcgatgtagctcagccttttgttcatagttcgttgtcttatctttcttcggtggtgctgctctctgttttctttttacccaaaacgggttgcgggtgttagcggcattctctacagtgcacaaagccgatttataacgtagagcatataggcagtctgtagcctgaatatcttgaaattttttcaaaaccgaaaatgtattagacagcgtacatatccactagcgccatcatgcttttttggacttccttcccaaacgccacgaggtatgcaatgtcagataaatgtacagcctgaaaaggctcaatattattacttttctggggttttttcactcaaacggcctcagcctgaggaaaagaggtgcggttcaaaatagccacaccctccacgtgaccggtctgagggaagaaatcaaagccacggacgctctcaatctcatagcgaacattctgcttctcatcaccctgaaccataacagcaatgtcacgagcctgggtatggacgttacagctgacatagacaacacgacgcggcttgaaatcaagcatctgacgcaagaagtcttctgaacaacccttgcgaggtgggtcaataaccagcaaggtctgatctggtgggtacggaacttccttgaagagagtggcggcgtcggcagcggcgaagcctgtgttgggaagattgtttgcacgagcattctcgcgtgctgaaacgatagaatcgcctccaatgtcgacaccgagactggacttaaacaaaggggagagggtgattgtgaacaggcctgagccggaatatgcgtccaagaggtacttgattggttttgcgtcttggtcgttgcctgcaggaatggcttgagagcggatgtactctgtgaagccggacaagattgagttgttgttttggaaaaaggcacctgccttgttgctaaagatgtagtcgtcgacgtactcgaaagacgtcgcgttgttgtctgtgatgcaacgcttttcttcaatgtagttttcgcgctcaatgcggatcacatcgcccgtgtctgcgttgggagtagcggcaatcccgccgacattgggagtctctccatcggcggtaggcgcggcgtctttgggaattcgtgcggtagactcccgcatcaggagagtggcacctcgtttataagaacggatgttctccgcaactcgtttcctctcactagtgagtccgcgacgcacaatgtctgtgcccaggggacagtcttcgatgtccatatcgagtcgtcggttcttgtatgtgaatccaattggggggacctgcggttgtgagggttcttcgccatcctgcttagaacctttgcctgcaccaccatgtgcgaaatgaggggtgagttttgttcgatatccaaattgcattggcgaagcaaaggtttctccaatggtaggaataagctccgggatcaacccagagaaattggcataggctttctccacaatgcgccgtttgtgagcaagctggtcctcgtaggacatcatctgaagttggcacccagaacactccccgaagtacttgcatccaatcagcgcatcgtttctttgaggacctggttcgatcactttaacaaaatcggtcaagctgtacgacaatgactcgaaatgtttgaccaatttgacccgtacggtgtctccggggaccgtgaacggaacaacatagacatatttcccattctcggcgagcgctagaccatcacctgttgaggaaagctcagaaatcttgacatcaatctcggtgaacttctctggaagggagaaaggcacgctgtcgccgttggtttcagcctgctcagtttcgttccgtttgaggagttggtttatatcgcaaagcaggacctcatcatgtccactgctcttgttgttcttgtcgaccttcgccttcttgcgcttgccgtcaaagtgtttcttgggaccgttctgcattattgcggggactggcgcattcgttgaacggcgttgacggtataatttggatgctggccgcgcttgaacggctataagggtctgagaagacagagaagaagtgaagcgccgaacagatgaccgtattgcaaacatgtaaggtgaaaagcgacagcacaataatttctagaacgaaaatcatcaaatgagaaatttattagaaacgcatctaacgcgtcgttgattggtcagacactgaccgcccgcaagaaagaacttcattccgacgcttcacctccggctggcctcttttgcctttgcgtcctccaattgcctccgcatttcgcccttttcttcatttttaaagctcttaactggcctaccgctggctggtgagctcacagcaacgccaccatgaacattacacggccggcacgatgccttttatgcagcttcacccgtgctgccgccccaggcacgcgagtccctcgacgccaattccatcctactcccgcgtctctctccaaccggaaacccaagttcccaaatgttaaggctccccgggtggaggaaatcaagccttacacggaagagcagaaggctaagcttgccaaggagtactcggaggcacagatggctgctatcgaagccggcgaagccgctatcgacccgaaggatctggcagaacagatggacgagcgcagtgatcccatggcatttaaatacgtcgacgacttctctgttattgagccaggcattgatcgacaccagcgctccccacagtcgaactcggattacaatttcacgctgaaaaccgaggacgatttcgtgaaggacttcggtcagttctttgccgagatgcctgataacacgacaggtgcagacttcgttcggttcgcagaaaacctgcgcctcacccacggcaaggaggagagcgagctgtctccgcacagcgcacttgttccggatctcttcggacctggagagaccattgatgagccccgcgtggaagagcggaagacagctgccgagaagggtgagaaggagcggtcagcggcggctgaagaaatgacagacgccctcaagagcctgctcctagctacgggctacacggagagccaggtcaagggcctccgcaccaagacccttgtttcacacagcgtcaccaaccagacccgactaggaaaggtccgccgtgcataccgtctttccattgctggtaacggaaatggtttgctaggtatcggtgaggccaagtccgatgaagcctccgatgcaaagatccagtcgcaataccgtgcgatccgaaacatgcagcccattccccgctacgagaaccgaacaatctatggcgatgttaagggcaaggtgggagccacagagttgcagctgatgcaccgtccacccggtatgcctagtttcattccctcggacattttcatttttgctaacaataataggcttcggactccgtgttcaatatctcatctacgagatgtgtcgcgctgccggtattcatgatctctccgcccgagttggtcgctcaagaaaccagatgaacacagtcaaggccgcctaccaggcgttcatgagccagcgtaacccggagcagattgctcacgcactcggcagaaagattgtcgatgtgcgcaaggtgtactacgcagggaagatttagagccgctcatggccttgactagctgcttcgtctcagcgtgtatataatgcttctcttttccttcctcttcttcttgtgtcttttgcatgtacttctataagttggttgttaaacatgacgggtcatcaattctcggtaatcatgagctattcacagcatatctggaaaatcacatatcacaaggttccttagcataacaccatctgattcgcgccagaacaaaaatctagaaacaacaccccgggtataatacgcgagtaaacaaaaaaaaaaaccatcaaatgcaacaggcaattcccatgccttcctttcttattggaacgtcatgtctccctctccctcatatcctccatgctggtactcctggtcctggaaacgtcgatcctcgttttgctgttgttgctgttgctcttcattctcattccagatctgctgctgcaagacaatgctatacacactggccttgagcaaagtgcatacagtcgcagtcttgcgctcaaggagacgaagaccgtcgagaggcatagaggcgggggagccggcgaggtcggcgagtttatcggagagctgcgcgcgaggcatttatcagtaaccagtataaccagtatttgtagttgatatcatttccaatcgaatattgttcatattcatttcctgtgcagagattgtcccagaaagataatcaaggcgaacaaggtcttctccacgtacctggttgacattccgcagcaatcgagcgtattcctccagcacttcctgctccagatctgaaacgagcggattgttacccaagagagggttattcgagtggccccggctgtgcgaggcgtctgcgtcgttcattgattggggtattggaggggtggaggtttccgcggggtcgacctcggcgtacgagtaatcgttgtctgaatcttcgggcgcaaaggcagacattatggaggatggggttggttgctgtttattgaatgttgtagatgttgagctgcgaagtctgcgaaggctgtggtgtcatgtttcgtgttttctggggttccgctgagacgcgttccccaagcttccgctgagatccgaaatctactggggtgggttttatggccttaaacttatttcaacgtcagtcaataggttaatattatgtgttcgaggttatagccatctctgtatagcctcattttcaaaaattcgcccaaacacacatctgatgcctatttcaataacacaggtgtcattaaagacacatggctataaatacatattgaaaccatcaaggaccgtctcattttatactgttgtatattatgaatacttcgtgggcttttcctttttctattaggggtaaaaatatgtcttgactgatagtacacaactctgtctcagttccttggtgctgttcataacctggctgggaggcgcaatcgcgagtcgatttcttttttttacggaaatggcctgtattagaagtttgttttatgggactattgaaagtcccagaaatggagtaactagatacatggacgtaggcagagtctctagattttactacatgtataaggcagcatacttccatttgcattgaacaaattcgtatccgtatggaatactctgtggagaacactcattttgcatacaatatgaatataaatctagctgccttgtcagcgagccaaccatattatcctcattgttggacaaaccgcgtgtccttatttggttgtatccacgaagcactagcgttggtctcccagccgcggcagcctctccgcgcgttctaccaaggcgaataatgtctcagtgaaaattcagctctcgggggaagagattactttgagcaattactacaagccgaccgcaaactactgtaacggccaatcttttagtgcgctatttcatcaccttcccaatcaaagagagagagacccctataattccatgtatatcaatggatgcccagaggtggagagatccactggagggaaaaatcacattcagcaactgtagtcgttgataagtgactagtaactagtaatctagaagcatccaagaagctcatcgaacgattaggttttctttaaacacggttaccgtgttgcatcatagcggtgcgtagtacttcgtacatattttggtggcctgagattgtcgattccagtgtggcactggccgggattgtattggttgtagatatccacatctcaacgacttggctgcaggattccaaggactgaatcagacgaggatgaagtagacgggagtccgtcgcagttcctttttccctatcaacgatgaaaagaggggactgatctttgattggcagagcattcctacaggctaatcgaattagtcggaagaagcttgggaggctaatgtcgcaattcggccctagcgatccattgtcgactaggatgcgaggaatcgacaggggcgaagtactcggctgaattaagttagtttatatttctgcctcaggtgagctttttaattcgatactttcgagatgatttccctatttggtcaacttagtcatggttgactgcgaaaattacagatccttcttagacagggttattatatgtgaatacgaaaacatgggaaaatgtaaagttcgaaataatatgtcttatttctatcacagaaatccccatttagaagtggatattcactatcgcaagcgcctcgtggtgggtgttggtctcctattctgtacggagtactccgtacaatgtagcaccatagacgcttttaggacaggttcccctgaaaaagccaacgccaagatattaatgggtgcggagtagaaggcgatacagtctagaagacatcttgccccgcgaaatacgcaggtcttttaccgcagcgtcgaaggaatacgcctctactttatttaaatgggagcctagtcctatatatatagtgtctgatgtgacatcgtcgcctccagtgaccgagtttaaaatgccgattcgactaatatggccttgtgcgagtttgccgcccctaacaaacggattgactctagtgtaggaaaggagccttggctttgcgctttccacattaacatcttgtccctctagaatcgtcttggccgttacctcatattgtggatcatgacaacacggcccataatggaaaggacacaatgcaagtcaagtggccacttcgcccttacgtggaagaaaaaacgacacggaatacgtaagtgtccttaggtaggaagttgatattagccagtcaccccagatgcggggctcgagcggaaatagaggggcagggctcttttcgtgtcgacagttcacagacgtttcatttctaaacttatgggatctggtccctggatcccaaagaataatagagttgcccaagagatgttttcctagggttcggggtagacacgtgtcaaggttttttgccaaatacggttagagggatttctactcttagccaaccttggaaggttcggtagccaagatagccaaggtaggttagccagatttatatctcattgcgaatacgaatggccactttcgaataccattgtctttaagtttctcaggggaaaaacccatcggattcattattagggggaatggagaatgttctctgtggattcctagtgctatagtgtatgtaatatttagaaatgttccatatgtagtggagtcgagcctttacatgggatagggggatctaaagatctaacgtttcaatttccgacaggggcatctcaaggtttaagcttgttttagctcggcttgtcaaacgggacatacaaagtatggtatagttgacgagatacgcgtatggaccatatttcatcttcgccacagtgcccactgccctgtcacactgcttcatccaattgtgacacgttactcaccccgacctccgctgtccattccccatggagttctcccgtgcccacatctcggttggacagcccaatttacactgccccctttgtctctgtctcctgggtcgagaggaacgggacgtcttagcgctacggcgctatgcaagtctaggtaacccaatagattaatgcattcatcgcgcgaataaaaaagcaaaatgatatgtccccgagattgatttattataatcgtcttcacgccacatccttcttccatgtacaaccttctgacctaaacaactatcggtcatatctcatcggattcttatcaaatgagtgagatgtccacctcagctcgggctagggacaatgtcttctcaagacgtgagatcgagggcatgcttgctgaaggaaagttgattatcattgtcgacggcaatgttctccgactagattcctggattaaatatcaccctggaggtgatatggctatcaaacatatgattggcaaagatgccacggacgaagtgaatgcgtgagtctctctaacacctctctattcttgtccaattcaatttgcgcattattctaatagccttcttaaagtctccattcacaggaagcccgtcagcgcatgagcaaattccaaatcggccgaatcgagggccgctggaccaacttcttgcctcccatccaaggtggcgagttccgcccattaaccgaaaatgagatcgacgaagaagacctgactctctcagagctatcaagcgaagagagttcagcaccaccatctcctatcttcgaagccgaagacgaaaaattgggcctaagacgcaggctctcagtatcaacaatctcctctgcaatcagcgctgtctctccgtcagaagaaaccaaaccacgagcctacgtgatcgatgctcgaactcaagaggagattgagctggatgcatctaaatacccgcctcttgacgcagaacaccaagaatatatcacaatgagataccgcgagttgcaccagcgtatccgcgcagcagggctgtacaactgtaactacacagcctacgctatcgagatctctcgctacaccctcttctttgggctgtttgtatttttcctcaaacattcctggtactgcctgtctgccttcttcctcggctgtttctggcaccaacttgtcttctccgctcatgatgccggccacatgggcatcacgcataactatcagattgataccaccatcggcatgattatcgccgattacctaggcggcctaagcttaggctggtggaagcgcagccacaacgtccaccacatcgtaaccaacgctcccgagcacgatcccgatattgaactgatgcctttcttcgcgctatcgcaccgcttcttcagctcgctccgcagcacctactacgaccgcatcatggaatacgatgcagtggccagggtcaccgtcaaataccagcactatctgtactaccccatccttctcttcggccgtttcaacctctacttcctcagctgggagcacatcatcgtcggccgcgggccgaaacacggcgcaggctggtggcaccgctggtttgagttcgccggccacatcttcttctggatttggttcgggtatggcgttgtctggtgtagcattccgacttggttcaaccgcgtcgtgttcgttctgatctcgcatatggtgacttcgccgctgcatgtacagattacgctgtcgcactacgccatgtccactgctgatcttggcccgctggaatctttcccccagaagatgctccgtactactatggacgtcgactgcccaccttggttggactttttccatggcggtctccagttccaggccattcaccatttgtatcctcgtatcccgcgacacaatcttcgcaagacgcagcagttcgttcgggaattctgtgaagatgtgaacattccgtatgcggtctttaccttctatgatggcaataaggaggttatcggtcgtctcgctcacgtggccagacaggcaaaactcctggaagagtgccggaaggcttatgcggcagatccccatttgcattgaagatgttcgctctaatagagttgagcttttgagatacccattatgtagtttgtattgttttgcaaattgaaatcgcttggaattgtgatacacccttttttctcctatcaatatttctgctttgaattctcgctttattgtgatctatcttatggagacttgatttccgtctgtcagtattatacctgtgtttgacattgctggccatctacatggtgtaaatgataggcgcacctacttggcagagacaatttaatgacataagaggatcattaagtatattgaaacaaaagccaaatgatgaaatcgcttcgagtttcgtatacatagcttgacagcagaggttatcttgaaaacgtaaatttgagattgaaaacagcacggttaacccgaaaaagcaaatccgtaacgccgtccgctgcgaaataggatgaaagagcaaatatataaaacagttttcaggaagacgcgcaaagaaaacaataccaacagctcagagatcgtgacacaaaccatgaagtcagcgaacggttcgtgtcgatgctatgttgtgcctgaattgaaggcaaccaagagtaatccaaggctctaggatgtgaagaaaaatgcaatatgcaaagcaactggcaagcaataaggcataatgacaatgtgatgaaaggaaaaaaaggggagaaaaaaaagcttgaatagatccaccaagaaaaagtcccgaaacactccatacacccagcaaggattgcaatggaagaagaatagcagcatctaaatacagtcgttaatgcatcatggtcgtctgcgagccgacacacatacggctgtttccctcgtgtatcggataaaagaaaacaagtgataagacgtgaagagcacaggctttacatatcaccctcgtggtgaagggtgacactgttgaactcctcgaagggatcgttgagttcgccgttcggagttgcgaggcctgaatccattgggacgcccttcatcctggtagaatcggtgccgccaatatctacgctagcgctctccttgacattacggaaattcaccgtatccgtgccggcacgaccctggtgcggaatcataggcggcttcatgtgacgaataagggcccattgggtctgtcggaagaagggatgagccttgacatcagaggcaccagcgcgagctcctaggcgcttagtctcatccttgatcagcagtttgcggatcagagacttgcacatggtcgatgtcggctgcgcacccgagtgctctggaaagttcacctcgtcccgcagaatgctagcaaacgtcgcgtttcgattcttgcccttgaatggagtagtgccgtacaacatttcataaatcagaatgcccagggtccaccaatcaacggcgctggtgtgaccgcaacccttgatcacctcaggtgcaatatactcttccgtcccgacaaaagaatttgtgcggaaatcggcaatacatgacttggtatcaatcgtaggcaagccggtattggagtttccaccactgcgtgcaggaatcatcgtcggggcacccccaggtccagattgctttgacagatcgaaatcagaaagcatgatatgaccagactggtgaagaaggatattttccggttttaagtcacggtagatgaaacccatgagatggagatattccagcgcagcaataacctctgcggcgtaaaagcgagctgcatcctcggaaatacttttgccggggcgggtttgcagggctaaaaatggacaagtcagcaagggaatcaagaagatgatgatgtcgaagatgggataaaaaggtgaacacactcctgaagaactcgccgccactacagtactccatacagagatacaaataatcctctgattgaaaagagtgatatagggtgacaatgaacgggtggttgctcgtagccagaatctcttgttcggccaaagctcgtttaatcttgttccgtttgatcatctccttcttgctcaaaactagccgcaagtcagtaaatggcatcagacagtcaccggtatacaagagaaaaaagtacctttcatggcataaagacggcccgatttcttctcgcgcaccaggtaaactttgccaacatcacccttgccgatcaatttgatcttgtcaaagctagcagggccgacttctacatttcgaactttgatggagtttgaactataggtgcggcggaaagcagcgttactgttgtaatctgagctgactgaaggtatcgccagattggaatggtcgctgcctggatctgcaaagcccattgacccgcccgacttttccaccaggggctccttgccgagttgtgctgtttgaggacggccaccctgaccacttgtaaataggccttgggcattcggggcagaagccacacgtcgtaacttgcgcgctagttcctctttgtttgcagtggtcgcctgttctactgccgagacccccgtgacttgcaactcaggggtatcaggaggagaggacggaactgacccatcgttgcggtgtcgcaatgctggctgaccctggtgggcaaagtatgggttggcggacgcggtaggcgacatcgcatcatccagtggattaccttcactagccacggttgttgatcgattgcggcctatgcctggcaggaatcgagactgccggaaagcagacttctcgttcttggccgccccatgattatcccgttcgcgttcgcgttcggaacttccagaggggttgggatggggagaggagtggctacttgaactgttgatacggaaaaagttcttaatcctcgtaggcaaatgactagactcgttggagtgttttcgtgtgggaatggagagagcggggaaattcccgcgcttctcattatttgtcaccgccggcggactggaggcaaagagctgcgtcatattgggtgggtcgccgaaatcaaaatcgagaccgagatgacagtcacctaggacctaatccgaagggtggaaaagcaaggtgtgaggcggacgaaagggcggtaatcttcaagatgccaagtgccggctgggatataatcgcgcgcgggggtcaattgttagtaagaagcggtacaaccgggggtgtccacccaaagaactgaaaaggaaaaagccgcgataactgggctcatgaataagacaacatgtcagaacaaataaagaatgaagatcaagaattgagaagccagtgggaaaagagggaggcaaggaggaattggagtggagaaggacccgtggacgcggaggccaaggcttagtcatctaaaatcaattcaccagcagtgtacgtacaacgtctatctacgccagaaatgttgagaatagtcgagaaagaatgataggattactatgaaagatcaatttgaaaaaaaagcatcccaatatgacttcagcttagtccaaggggtcctgaataacccaaggaattagtactaaggaactgggtggcgacatgtcgagtataaataactacatgtatctacaatgtacatcacgtgatagttatacacttcattcctccggaagaatatcaatacataataatattgtacagattcatgtttcgatcccttcaaaatcgtttcctcccttgactcaaacttggtccatgtttcccaccctttttttttgcttttttctgccttttctgccttcatctgaaacacttcggagacttcgggacacatacataggcctgggctcaaatccgcaacgcccaacaccacggttgcttggtatcagttttgagcatgcacattgattctgctggtgtttacaatagcgggtgcggtgtgtctgacactggcattgatcaactgcgaggaatacccagacaggtaattggtgttttgctggctgtctggtgtctcgaaaccgagaacaagtgctgtgggtacttcgtctctcaaatctccgatcaatctcgatggattcatgagcgactgaccggcgttctggacattttcacgtgcatcatgccgtcgacgggcatccagactcgatgagatcatacgagacccaacgctgctgagaccacctgcaggtacatagtgcttacggcgaacactcgacctcgaaatcgccctgctcggcctacactgggacaataggctatccctgccgaatgtgttattccgagacaataggggtgcatccgacatgtcgtcggggtaatcccctccaaagctgttcattgtccgagtgaagctcccactgcggctattatttgttaaacccggctctttgcacaagcaagtgagtttggataggcttacctgtggttcatgccatgctccgattgttcggcgaagggtcctctccgttcaccgggtccttccacgtcaacgacaaacatatcgaaaaattccgtcggaatgagagacgattggtggtcaaacagctcagtacttctgtgcggccgatcaaaggaaacttctgagaggttgtcttcattcaacccctgtcctaggctagaatgtcttcttgtctgttgttcgtcatctgaaccgcccgaaattgatgcaccgcgggcctcattatggagatgctgaagcccaatcaaagttgcatcttcattgctgcagctctaggaattagtattatccaactgctagtcttgggcaaagaacttacatggtagtcgcgaggcttggtgaatgactcctatcatttccagccatgttggttagttcggcgacgtgctcctcgtggtcaatttcagtaatcgaatgcaatgccgatctgaaattggagacgtttcgaccgaagttccgaggcaaagtattgctgatacgacttctgtttccgggacgacgttctgtccatgtctcctgggggatccatgatatgattccgttgtgttccatctcagaacccatttcaggagaaagttgaatttccacgcggctgttggcgtcaaaggacgggtcattgtattttgtaggcacgttgccgcctgtcccattcgcatcatgaaacaactctgatcttctatcgacctgaatctgattgaagaatgagtcgcttctgtttctattgcggtcttcatttacatcatcatgaatccacaaatctgagcttccatcaacctgcacgttaccaaggtctgagttgttcccatttgtgtggcttgttccattgcagtttttgtctgctgctgttaagtgtttcctctggatttgtatgggatggccagtgtttgggtcaataatatcaaccccacgatttatgttggcacgctcaacctcattggtaccatcagtcgactggttatcatatgaaccaccattgatcgctcctccggtttgcacggtaataccttccggaccattggagttgttcacgctagccgcccctggatagcccatgagcatatcccattgatcaagagcgctgagaactcttgcccgttcgctgatgttgtaaacgcgcaaattataacaatcatcgctgggtggaatctgtggatttaacgcgatcacttcgttaacctcctccagaaatctttcatggttttggactttttccatcaatcgtgactttgcctcaatcatggtatcaagaccgaacgcgtatgccactcttacaaatccaacataaaagtcgcaatcaggcaaaacagcaaacggcgggcacatgtttaacatcatacgcacaattgcagcatcatcaaggttgataagactcatgatcagaccccatcgtgtctggcgctcctcagccagacgggcaggctcatggcgcactgtgcttggattacggcgaacgaactcgatttcgtctactcgctcaatccattcagcatatggattgtctgattccattaactgggaaacggtcaaatcccgtgaaccgacaggagctgcgaactgggatgtgctttccagaaaaggcgacggcaacccctcgtgtaagttaatatcggacgctgtggaagaatggatgattgtaaagctctcttgtgttgcttggttctgagtcccaggctgaccatcaacaaagacaacaaattcgtcgtcattcattgaggtcattgacatgggcgacgagccaccaaaacggggtgatggccttgatggctccattggaacgattcttcccccagccgtgacccgctggtgtttcggggaagtgtgcttcttcaggaattgagcaaaccctgcgtcattcgtggggaacacaggctcaaaggactttttgcttgtgcgagtcgggcgattcttgggtgctttcgatgctagagttttgttcggtcggaataacctggctgactctttagtcgggcgatttctcgggttttctgaaaggataggcttcttgcttcgatcaagacgcgctcgtctgcctgtggcgatggtcagcaagttttctttcattgggttatacagactcgatagccctgagacccacgacaggtcagcttggtgtactggaacccagttcgcaccagtgatccaatcgaatgtttgtctctttagggaagatcattgatcaaaagcatcgtcacaaagggaaactcacagtattttgcttcactggtccacttgcagtgtacacctgtgtcctggcacaatgccaatagtgttggcaagttatacttcattttgttcatggggatgaaatatttacctgtaagaataacagaaacgaaagacttcgataaaaaaaaaggaattgttgaggggatccaggtggaaggtacagggtcaatgaagaaggaacgagggctcgaggctattcagaacagatagagaccagagtcacgaggtctatactcgacgcgtccagcacgcgtcgatattggccagtagccctaaacaggaaggaaggacacttgaggaaggcagagagagaagacaacaaattcgaaaacgaaagaactcctgtccaaaaatacggttacaacataacagcctatacactctcccggattttcacaggttgaaggccactgtgtacaccccaatactccccattttcctcagaaggtgacatcacttccatgccatcgggttcaatattcccaatctctttttttccctgcctcatctcccagcttccggtacgttcatgtccctgtacagccactccaactccagcggcgagaccactggatgcttgcgtactatcagtcttggagtttccccatatgggttcactgaacgacaaatcggtatcactggcaagtttactaggacctttgaaccctcccaagcttcctttcttggggtatcttcccttgcgagcacgacatatgaggaacacaatgactgctgtaagtccaatgacagcgagcgttgtaacagcaccaatgactccggctacagcgggagccaaacctctattcttcttcggctgagatacggtctggtctaacactccattgcagaacacagtttcagcgttgcagcgtaggcaccattcttcggttgatgccagcgcaaatgtctccagctcggaatgaaactcagtatatgggattgacgcacgactagggccgtgtccaaagagggaatacatttcgaagtcggtggtgttgtcggtcccattgtgaagcaagaatctcacgtacaaattgtccatcccagggtatgttgggtacaagttgctgctgttctcgtagctgtacagctcgaaaacaaatgagccacctcgtaccaagcgggagaaaaagttgggttgatgctggtttgcgagtcccaacagagacgacagggcaacagctggctcatcaccgccgaacaacagagtcatcttctgccgggtgccacttgcctggatgttcagatcgaaggcttctagaatgctcgatgccaatgtctgcccggcaattgggctagctactctgatcgcagacccgctggaagatgattgttggctgttggtgctccatgcgtactggtccgccagcgagcgagcacggatgatgtcggcgtggttcagactttccaacaagctgtcattatgcacaacttcataatccaaatattccgagattgcaacggcatttgtgtaagttgcagaagtatcatcgtaggctccagacaatgccagtttccatagttttctataaaaggcgtctgtgtctcgtgtgatatcctgggcttcgttactcccacggtattcgccttcggcggcattatacatgtcacacatcgcgtgaccttcaatcaaaatagactgagggtcggcattaccgactgtaacaatccgagggtattggtatccgttcaatggcgcctgtgtaaacgatccgttcgcaatttggctgctcggtatgttcattgagcccaatggtgggtatagaccctgcatgaaggcttgggcggaaccaacaatgttctgatccgttgccgagagcacaaccacatcgtttgagtccaaaattattggggatatgttctggattatagtattagagcctccagacacataacgataacggaaatccgatgctgccgtggcgagttcgttggctccgtagtcggtcaatgttcgagagctggtgagctcactgggcttgctgtctccgtagacggtaaatgcaaagactccccatactttctggatggattgggagtcttgggcagagaccattaccgggccctgaagggccaggagagtgatgaataggctgtacatcaacatggtctttcaagcatcaaagaacagcaggccttgactggatggatggattgattgactagctctataaactacgggggcaacctctttgtagtaaagaaactcggacctccatggtccaggcctcgaatggtatggtagtgttagggttacgaggataccagggaaccagacggtgagatatccgctttcaggagccggtagtactgctagtagacataccggctttctattcgcgaatatcaaaactcaaggcactccaagctttcgggttcttcggatggtgaggagcagctgaatcttgacgacactattaaccttgcatgtagattcattacgaagtgtcaatcaaaaaggatacttgaggagtcactgggagctagaagtgtctagtcgatgtcaataataaaccacacaaaccacacaaaccacacactatatatattgaacagtaggataacttcattcgatttataaattcagaaagtaccatgaccgaatctgaattttgtgtggatgttcatcacagctcattttttcatacgattggtaggctcaaggttgcacacaacttatacaggtggcataggattgatgacgcgcacaaattatccgcaaagagagagtcgatgggacttttatatacaccagtctacatagatacctgggtcataatttactaattgtagataatagtatacagaacgatagaatgctgtttacggaacaaaattccgtctaaagattataagtagcgtacatgtaggcatcactagtgagcaaatcgccaaatgtatacatagcacgctagtcttaaaacggaactagccccctgtgaggtacctgccgacctacaatatacggagtacatgtacataccatatgtctctctggatattgtcatgatatctgcatattttggtagtattttctcttatgcaagccagtttgagccaagaagattggtaaatctggcccaccctcagcggcctcggagattatctagctgtaggaactcaagatcacagagatatagataaagttcctagagacgatagcagatctctatgtactcgatggaacaattgattgcctcattctcctagagaagatatttatcacctttttcccggactgtctttcttctaaaacctgggcagaataccgaaaaatcttcagcgagagtcactgggctatcgtagatctgataattgatattattgaataagagacgggtttcatgccaggcatataaggtagaacaagttgatgatcgttcgagagacctaaaattaatacgaatgatgtaccttttgcatggtgaacacacgaaaaaggtacttatgaattgacgagataaacatacgcacatttatacactcaaccacgcaacttccgccaaggtttccttctcccctctccccattaccttccttccacgaacctccacgcatacatttttttgatgtccacgcttccacccatcacctccgaaatttctaccgcccggcagaaaaatcatattttgctcctccatccttcttccgcaagccctacaaatgcgccctacccctaagccctcatttctgctctcggaagttgataccccgacaggcgcttattccaaatggtcgagactcgaggcgcgcggccatcattcgatggccaggaaacatccgactttcctcccttcccctctgatggaggtgacattggtaagtgttctcttcaagcgcctcatccgatcgtcccgttcaccagcctcgaccaccccacccatacctatcaccctcatcgccaatgggacctcaatataactctagaatcaatactcaccttttaaatctgtatcacagaccaaaaagtgtctcattccctcgacgatgaggagcatggatcgcctccggcggccaagaagcgccgtacaggcgatagctccaacggtgatatttctctgcccgacggagtcaccttgatggccgatcagcatggccctggtcacaaaattgaagaagaattggcctcggctctcggcgaaggtgttattgatacagttgagcagaacgttctcgatgtgaaccaaactcttcagcatagcactcacaacacccatgattcctctacagaggtcgccactacccaggacggcaactctgatctcaatcacgacgtggctacaatcatctctgaaatcatggatcacacagagcgtcaggagcaaaccgttgcaatgggacctcaagaactaccaccgtcgaatgatttcccaggagccagaggttttgctttcctcaaggccaactctcacctcaagattcagagtctccctatcctggataatcttgtgagttgaattgatactatttacacaatctcggcttcctaacatctggccaatcatctcctagtcgacgcaaatcttgtcattcctttccaaaaacacctatcaagaccttactgctatggtttccgaacctgactccgaaaatggccaggcatatgccaccatgcgctccttatttgaccatacaaagcgagtctacaccgtcaagcactcattccttcagcctacggaccttgaaatcacagacccttctcaaattgatgtcattcgcaaagcgaacctggcgtcctttgtctcgagtatctttggatctcaggaaattgggtttgcggacctcaatgatcatttcttagacgtgtttgtccccgagggcggtcgtttactgaaggtccaaggtgctctatacctcgaactcaagacacaggctttcatcgcagccatgcataacaaatctctcacccgtacacagctcctctacaatctgttcccggacgacatggaacaacggttgttggcgagacgtcctggtaccaggcagctggcaccatctgagacagatttcgtgaatcgtctcacctctcgccgtgacatccttctcaatgagatcaacaatgaggaagcgctgaatgccctgccggataagtatcactgggaagatttcctccgagatctcagctcctacatttcgaagaactttgacgccatcaatacccaacaggttcgtttgttgctctttatcttcctcaaagattatttttatgctaagatcatctagggaaagaaagccgtcaagggacgtcagccctcgagttcaaatggcgatgctcacgaatcgcccaacaccacccaccagggtcaattcgcactcaaccaacaagttgaagtcccggtggaccgaaacatgcatggcgaccttgtcgcacgtgctgcccgagcagcgcagattgctctacagggccatggtctccgacgctctcagcagcagtcgcaacaacagcatcagcagcaaccccaacagacccagtctcaggctagtccgtcgcctctaccgcaacaaccgcaacaaccccagcaccaacagccgccaccacagcagccgcagcaacagacgatccaacctgataatcaatatctccatggctacactgctgcacaacaatcgcagccagttcaccaacaatatcatcatagtccgaccccccctggaagttatcaaacacagcaggcctcccccttgactttccagcagagcccgttacaggccaccttccagcaatacaaccccaatgcagcgcaagctatgcaagctagagcaaatggcatgtcctccaaccatggatacatgccggggattccccattactctcagtcacagcccactcaggttctctacgagcgtgcccgaatggccgcatctgcaaaatcttctccgactagccgtaaatctggccttcccagtcagcgtcgaccctggaccactgaagaagagaacgcgttgatggccggcctagaccgtgtgaaggggccccactggagtcagattcttgctatgtttggacctggtggaacgataagtgaagcactcaaagatcgtaaccaggtacagctgaaggacaaggctcgcaacttgaaactcttcttcttgaagagtggaattgaggtcccatactacctgaagttcgtcaccggtgaattgaaaacccgcgctcctgcccaggcagccaaacgggaagcccgtgaaagacagaagaagcagggcgaagaagacaaggcccatgtggaaggaattaagggtatgatggcccttgctggagctcatggggcacccgtgtcgggacacgatatgtccgcctcacctagccttccaccggatgctaacagccagtccgtatttgatcaaaccgcggaacagaacctcatgcagactttgagccaggaggtacacggaagtcagtaccctcagcagcatgctcagccaactcctgatcacatcgatcctcatatgcagttgggacagtagaggattgtcatatccaaccatttgtcttattgatttagctttttatccgcaagattcatcatgtgaacttcggatttgcaatttcgtttcggagtctagggctggattgtgatatttgttccttcgggaaccacatttgttttactatgggattgcgacattgcgccggactgggcgattgcttttattgcatcccaattgtatgagtacatagtgatacatttcaaataaatgataatgaataaaataaacacactctttagatgtagatagctttagattacaatatatatgcgttgatacatagcgtggtagtcgaggtaggtcatcagatggcccgtgcaccacccgtgtgactttgaatctccctataaacgaacgtataaccgccgcagccattgattggccttgtacttggaactctgcagcccagtctcaattaaaggatacttgcagggtttcccgccgatatttgcccaacatggccgactctcaaacatcgcaaccttcccaacccataccccagaacggatcacaagagcatccccctccgaccgaatcggaagataacatcaaaactgagcctgatcttgatgtttccatcgaaaaagacgtcgatatgaacaccgagaatcagaccgaagcgaacgcgaacaccaccgcgcctggccaagatcccatggcccccgcgccagaaccctccaagaaggaaacaagcttgcgcgagttcctcggcaagatggatgactatgcaccaattgtaagtcatctctaaaacaagactgtaacctctctgagcttcccctgatcgcctggtcacacggtggaccacggcatccccgccaccatcgattgatcccaagatttcgcgcaagcgcatcgaaagcgagacccatgatataaaacaaaagacccatcggacaatcaaggaaaagcaaaaaaaaactgaccttcgatctccagattcccgacgcagtcactgctcactacctcaccctcgccggtctcccaccaccaggcactggccccggccaaaccccacctcacctggcgcgactcctagcgcttgccgcacaaaagtttgtctcagacatcgcagcagattcgtaccagtttgcccgaatccgcgcctcaaacagctcctccgcaaacaaccccatcggcagtctagcagctgcggctggtctcggtgctccggctggcgcaggtggtgccccagctcctggcggcgatggtggtaagggtaataaagcaggcacccatctcggtatccagcggcctggatttggaggtggtggctcgggtggctctggtcagggacgtacggtgttgaccatggaagacctgggaatggcagtctcagaatatggagtcagcgtgaagcgaggcgagttctacaggtagtacattgatggaaactgctcttcggggttttgcatcatttgtcttttgcattttcgggcttatggcgtttaggtgtgcaaatggtcctgcgtggcctgggatcatgactgcattgctagtctgggctggtgtctgggcggatccaatggatggcgttttctcttttttcttaactaacttttacttactagaatctgtgcctgcaatgctataggaactagttaagtaatgatatgaacatttctcatgtgttgctagcttcgaattatgcatcagaatctataagaacaccgcagattgaataaggactattactcgttatttgccttcctatacaggttctatttgggtattgcactttattcgcagtttgaatctaggaaaaagaaaattttatattgaactccgacccaaaagcagctaatgtcacaatgaatccaacgatatatctgtacatagtgtcgcaaaataaagagatgtaatgtagctctcctagtacaaagaagtatctgcactaggatgatcatgcgagtcgtttatttgttcttagactgcttgtatgtgaagcgcttgcgggtcctgtagagcagattgaatgtcagtaaataaccgcatcattctgagcctgctcatcatgcttgtgctgaacagacgtagaaatatgtatacatacgcaacatattctccaagcttccgtccgaccatctcctctgtcacctggatctcgacgtatgtcttgccattgtgtacagcaaagcgcagaccgacaaagttcgggaggatggttgctgcgcgtttcgtggtgcggatcgggggggtgttgggtggaggggggagggtgcgtgggagaggaagactgttttggataatccagtcagctttcaattccagtatgagatgttcccgttgtaaaggttttgtaggttcgaagggaggagtttgatttctgtcacgtacgggacgatgtttgggcctgttggaagtattagcgtgtggcctcttaggaattgatcctgaaatagagatcttctagatccgacaagactcacctttccagaccgaccggccgaaaagggcgcgtgtggggaacattttgacttgagggtttccgcagttgcgattccgcgatgttgaagatcaatgtcgaagtctcggcgggattatgtcagcacttttatagaggtcgtgggcctggcgcgctgaaagaatgaatgcaataaattggctgagtgataaacgaagatgtgatctacatagcgaattggactgaaataaaatataataaaagttgctagtagtgcatccaacggccgccagcaactgtgggcacatgcgattctatactccatctcactctgccagttcctcaaacatcttaacgaggctgcgcacacccatgagtagattctcatccgggccttgtccaggggtccagctggcatgtgcaaaatcaatcaggcggagggcgtggactttaggagtttcgtcctcctcgtcatcgtccacgtcgggcatctgcatggtttcggggtcaatgctgatattgatagcctgttgaggcatcccatcaccaagctggacattaaccatctggaaagcttcttcgggaagttcaaattcctcgtcatcttcatcatcatcttcttcttcccgagaacgggttgctggggctttctgttcctcttcaattgcctgctccatcgcttctatatctccttcgtagaccaccaatacactcgcagagtacatccggctctcttttgattcaagaacacgctgcaagtttttcaattcttccgtcaagcgctgggcgaccatttttgatcggtctatcttgcccgcctttgcgccagcaagaaaggtttcaaagccttgcttgacattatccttactgaaggagcgaccgtaccacttgtcataccgccgatagccatccttctcgatgacttcgcctctttcgccctctgcaccctcgtatttcgtagcatacgggtttgtccgatcgccctcatcggtctccccattgtggccagtccagactttcatgcccgcgatgcgatatccaacgctagaactggtggtttccttcgatacggtatcaagtttcttccgcttctcgagcggcgcatcgtccgcccataaacgcgcgccgagcttaacgtccagcacgtttggccgacggaacccacaggcgatgttctccagcacgatcgacaaaccagtatcgatttccttgcctccagagggcacccatactgattcctccttagcaggggcagcgccgtctttgtgcgtggcggttgtgtgggatggcggttggctaggctgggagaaatcggccgttacgtcgccgggctcggagaggggaaggatgccagattctcgggcggcagcaatcgccagcggttgctgttgttcggaagatgagagggatccgacgtagagaggcatgaactcctgtaattccgggtggagcgcgctggattcgtagaattctacctcttgccgcgtgcacggtttcgcgatcagggcgccagaggccgtacagcgaacgccgtcactggatagaaatatattgttagcatggacataaatcaaatatcgtactcgagtccgccagtgttggttttctttcgcacacccggctgggttaattcgtgtgggacgtcgcgtcagggcacagagcggcggtgtggaacttactgtccggcagcagcatggtcaaaagggatcagatcctcgctgcccagctgtggtgtctttcgattttctgatttcgaaggcattttgatacaatcactcggctcttatgacatgaggaggtctgtattccggatgccccaaacagctggagtagtcctgaggtgtagagattcacaggtatctttaagcctggcaaatagaatgcaaataaggtgaattgtttaaacgtatgctaaatgctaatatatgagaaagaagtgagatctggagaaatgacatcccaaacgcgggataaggggggtgggggcgatgtcactctcaaccctaatcttagatgaactatacgatctgtgtatacaacattgaactcactaacttatccattcataattgtaattcttggatttttcctttatttattttctcctttcaaactcaacaaattgtaaatcatcttataatagtgaaagaaacataaggttgtttgggtgtttggttgtttgcctgatctcatctatggatgaggtttataacgactaatcctcacaactaaacatcacgactaaacatcacgactaagcaatcagagccttgctattaagtcttgtctctttgttttgatctttccttctccttccaatatttatccttgcttctcgcaacacggaaacttcatcctttcaacctcgttacttctatcattcatcatggatgaaaggcccgagcctacccgtgaagacaatttgtctccccctgttcagtcgcttaatcctagcttctctgatgagcctatgaagcctactaaagtcatgactggagacggtgcccctgctaaccttgaccccaccatgccggaccaagagcatagcgaagccaccgaggaaggatccttcatctcttccgcggaatctgtctctgaattgcctcaattatctgctaagcaggctcgggttcatttcattgaaccagtcattccggagctcgagaagtcagaggatgcactcaagactgagcatgatgtgagtgtcccgattctatctgcccaggatccaatctcctttgtatcataataaatattatgctgacactactctataggttgaggagcctttggcttgttcggatcaggagcctaacaagcatgtttgtgatgaagctgaccttggaagtgctttacctcgtgtttccatcgctacggaagagccagagaatactacggacaactcggatatgaaggatggtgcgaactcggagaaagaacctaagattggattcaggcatgatcccgacgaggaaagggttctcgcaaacatggaacttgacgatgatgcttcttcgaaatcaaagaagaagaaaaagaacaagagacgccccaagagccagagaggagaggtaagactgtgatactgatgtttaaacaaccggattctgtctaacagcctttaatagaacgcgcccacgggattcgaacccttctatgccgatgcaccaattactccgaaggagttcgaggagaacaagaacatctatgatccgtaagtacaattctaacttccaaactgagacattgtctaacacttcatgacagtgctttgcccattcttgagtaagatccccagatattatcgcataacagccactaatatgacctatctagtcgaattgacgaggcgatcaagcgcttcttgtacaaacgacgccttgagccctacagacgcaaggttttcctcaagtacctacagtacggcggtgtcagcgtgggccccaaccattcgcagggagtgactccttcggaattgaaggagatgtctaaagaagaggccatgcaagctcgctgccacacggccaccattcctaagatgggaaaaccatacccaatctctttcaatgacgttgccactggctacctgtgagtcttataatatttgaacgcttattcgagtcatgcatgctaacttagttgatagaactgggtactacatgggctactacaatcctgatactgaggaggagatcaaagtctgcactgacaccatgaagaacttcttttcctacctgctctaccacaatgtttgccccgagcagaacgaggaccttgaggaagctcgaaagacatgtgatcggtccgccaaagagctgtggatgaaccagcaactcgtacaccatcaaggccccggagacttcaaccgcggttgctccttgctgtttggtggttactacttcgaggatgtcgttgaccccgaggtttggtccaacattcgatatgctgaccagaaggtcttcaccgctgaaatcgctcgcaaggtcgtcaaatatggcattgcaattgccgggaatgatcggactgctcgcaaattcaagatgattgctgacaaggacatgatcgaagccaagcagattccggacatcgatggctttgaggtcatctccgtggaggaacctagtgaggaagtcatggcatactacagggagctaggccccgatctgatgccagtgggcaaggttcgaagcaaggaattccgtgatcctgctagaggtcccttcgacctcactccctgggaaaagatcgactgggatgctggttttgccccaacttacgagttcgaatttctcgtcgaagctcctctacttgtccatatcttgcccggcatgaagattatcacagacgtctatcagaccaacttcggacagtactatttcgatgagattctgtcggtcctgccaagcttctacaagttcatgcacaatgactggatgatggactatgtggagccagcgcctatcaacttcatccccgacgaggaggaagtcgcacgtcggctcgcaaaggagtctattttgcgcccccctgagcctaccccagccgagtgggctatgcatatgctgacacacgagttggactttgctgtcaagcccggtgaggatcccatggtcgctgtctggcagattatccacaccctagaaaacttcggctgggacatggaggaagtcaaagacctgatgggcctggtggatccgaatccacagaaaggcaagggaagttcggcccaggaagagcagtcccactgtcgccttagcaatgagccccgcaacattcccctgttcgaaactcctaagcaggccctcgatcggactatcaatcatttccagaacccggaaaggatcaagcccgttatcgcgcccgaggtcatcgcgaagttcctcaaggagaaaaaggaaaagatagaaaaggaacaggcccagaagaagatgcccgaaatcacgatggagatgatcgtgaagttcctcaaccataagaagaagatgatggaaaaggaaaagtcgaagaatggacccaaggcatcgggtgagaagaaggctaccaaggatcaggaacctgaggtacaggccaagaatcagacgcccgatatcacgccggaaatgatcgcgaagttcatcaagcacaagaagaagatgatggaaaaggaaaagtccaagaatgaaacccaggcgtcgaagattacgaagaatcagcaacctgagggacaggcccagacttcggatgagcagcatgatgcgcaagaccaggagtctgagggacagcccaagctaggtgcccggactccgggtgagaagattgcgaagaaccaggagcccgatggacagcttaacctggaaccaacggagacttcgaaggagtaggctggtgagaagaatgaggaaaccgagactgaactggagggggactattagtgactgcaaggtcactaactagatgcagctatctgtttacgaggtgatcagtctgctgcaaatctgccggggggttttccgaatatgttttagccaaatgcagcacgagaaaatgaaattcatatggatatcaaaggaacattgacaccctcgtatcgtacgtagtcttatattatcgaacaataatctgttcctattgtttaaaaaccccaggtcttgactcaaggcctcagcagtgacttccccatggtcttccgtccttccagatcctgttaagcgagttagaatttacaatgaggattccacgcaacgaacgacagagactacataccttgtgcacctgagcaatgtcctctagcggatatatgttgtggatcttcgtcttgagctggcccgacttcagcaggccaaacagctcagttgtgtaggatttgaactcttccggagtctgtatgtatccgaagagcgtagggcgagcaaccttgacacacttgggggaaagtttcctatagaaatatcatgagtatcactagccaagaccaatatagagaggggaaggccatacgcaagaggaagcgggggcacaggaccactggcattgccaaaccagatgacagtacccttgcgcttaacagcctccaagcttccctcccaggtgtctttgccgacagaatcgtaaacaacatcgacaccacgaccaccagtggcttccttgacctgtttaacccagtccttgccctcttcgctgcggtagtcaatcaccaaatcggcaccgaggctcttcacaagcgcacacttctctgcgccgccagcggtaccaataaccttggcacccatagtctttaaaatctgcgtcataaggaagccagcaccaccagctgcggcgtggagaagaacccaatcgcccttctgcacgggataagtctcctttgcgaaagcaaggacggtcataccgctcaggaacgacgccatgacatcctcatcactgatcccctcggggatcttcgcagtgtgggccgccggcactgcggtgtactccgcatacccaccagtagagagccatgcaacccgatcgccgacctggaagccagaagtctcgggaccgagagcagcgacaacaccagcgccctcgcggcccaagatctcgggcttgggtgaggggtacaggccagttcggaagtaggtgtcgatgtagtttacaccggagatgttgttgcgcactagcagctgtcctgcttttggggtaggaactgggtatgaggtcttgaattgcagcacctcagggccgccggtctgctcgaccactacagccttcatggttgttgggacggacatgctgcggattggaatgaattggtttacaagaggagcaatgtgattgtgaagtagtgcgagtcgaggactactacgtgtaagagagcgaaacatagtaaataagtaggtggggggtaagagagatgttaagacatcagcttcatatttgtcatcggatccccgcaatgtccagagtccggcggaattgttgcgctcccttcttttcttttcttttctctttcttttcgaactcgataaattccaatcttagtgtttatacggaatacagcgcatctgactttgataacgcgcttcatacaggttcccaaattcaacatgattgacatgtcgactattcacccattttcacagggatatgacgccatttccgtcggaccacccgtcggaacaaggctatgttatgcgaatcattgcaacagcagtgcaacatgggcttgtcagggcaaggatatccaacagatccaatgcggcccttctctgccaggagactcatagcgccaacccaaagcccctggccagatctgttgctgtattagcgcttcgttttccgtacaaagtcaccatgcaagccacccggagccccatgaggggcaaatccccacgacccacgacccggcatatgtccgttagcccctagctgtgcatgaggacgacatagagctttgcgtgtcatctgccgctgactgcatcatgaaaccttggaagaaatagatctcccccgctccataaacttgagacaatacgcaggccactagcctctgatcggtccgatgtttcctaaacaccagcgcccctgaagaacgagatttccacttgttgcccaatgatccgatatgcatctaaataaatcaacctgaaacgcagcggcagtacccggggggttccacttcgtgcccaatagtcaacaggctgccatagccacactgtcttgtctgcgcttccactgcccttgacttgtgatttctcttcagcctgaagctattcttgttcgtatttttggtcttgcccaatcactcaaatggcctatcagaggtctattccttcagggtgatgcccgatgccatccactgatgcttatatacccctgtacacccagctggcgcacgcactttaaagcgagcatctttgtctactcccacgaaaaattttctctctctttcatacgcgccaccattttctgctcccctgcaaactttcgcctttcaagtccgactacttatactatgaaccacatttcccgagctattctacgagacggtaacgcaccaggttaacgtcctcaaacaagcatatcccatacaatctgtgtggcaaaaataattccatttggaaatggcttcctctcgaagctctcgacgggcgcgaccgcaatggcctccggcgccctccgtcgaggaagagccccagtccctctcgaaggagttaaacggtctctccaagcttggagacaagcccgggttcgacggtgttcatataagaggtgctgtcgatcagtatcccattatagtcgccgccaactcgccccctccatcatctacctcccctgtcagtgttcccggtgtgtctgggctcgggagtgtgtcttcggatgaaagtgcagggccaaagacaccgcctcctcaagagccgatcttccgaaacaccgtcaggtttgagacgaatgaccggccaaaatacgtgtcgccctcaactgcaagccaaccacgcggcccagcacctcagcctctggcccagcagcagcccatccgtgagcttaacccaccgcgggtacctcagccgccctcccatatccgggatagcaattttagtagacacgggccgccaatgcaaaacacgtctcatggctctcgcggacctagcgcgccggatcgcagtgatgcgcgagcgcccatgcaggacaagacttgtctacaacctcccgggccttccatcggtcgatcaaacagtgcgagatatacccattcgacacgaccaatgccagaacgccttcgacgggagcctagctcggggtatttgtccgattcggccaccacagacaacagaccaccgcaccggccacagccgcctgtgtccacggcccctgtttcagctctgccaaatgggcccaccctcgcagaacggattgaggagaagcttcgccaacgacaagaacagcgggacccgggttttgtgtcggatccggaggtacggcaaatacccacaactgtgaagcccgtcaaaccgcatattctcaacacctctctgccccctccgcctcctattccagcaccagcatcgcactcgcctttgcgtggacctcagcgtgtccccgcccaacgatcacagcatgaactgctcccggcctcacgtgcccgcgcgacatcggtgacaatgccgcctacccggtcgatgtctggatctcgccatccctcacgaccagcacctgagatgaccaagcctatatcaaccccactcaatcctgaccggtcgctggctcatctcgcaccgactagacccgcagccacatcaccacagcgccctagctcggtaggcctgggcctctccccatgcccgcgaaccatcgccgtagcaggttaccaggattggtatacgctcaaaggcctcacccacctggacatctgtccatcctgcgtgagccaattatcacagtcccgctaccgcgactacttcattccaagcctctcaaagccagccggacaaaagacacgatgcgccttcgccaacgcatggacccgtctagcctgggcccagatgataaagaaacaacacgacagcctggagcttttgtaccaaatgacacgcccaccaccaggcatgcgcgtctgtcccggtcgcatcgtcgcagaacaatcctggcatcgcatctacgacccggaaaccggcaccgatctcgcaggcttccacgtctgcaacagctgcgcgcgcaatatccgcatcctaatgcccagccaccgcgagaccttcctacccagccgggatcccagcgagcggctgtgcgacttcgtcacgtccagtccgcgattcgtgaaattcatcgatctcctcgatgcgtctgcatcccgtgctgaagcggactcctcgcgcacccgtcgcccggatatgcgcgagttcctcaactacgcgcggcgcaaggtcgtgctgcgtgattgccgtcgcgataggcctgctctgagtacgtggcactttatcccgtcactgccggagatgtgtgtctgcgaagactgctacgatgaggttgtttggccgttggcccggtctaatcatcccattgcgtgcatggtcacgacgaagatgcggatcttgcctggtgatggccctggtcggactcgtgaggcgagttgtcagctctactcgccacgtatgcgggcgaagttccgggaggcggttgttacggatgattttgggttgttgaggtctgtggcgcagaggagggttgaggccgagcggcgattcctggatcgaagggaggagttgttggttgcccaagcgaaagggtatgattgtgatgaggagatgaggaaggctgttgatgagtggaggaggtgggaatgaggtttatggctgatgactgtctgtctagtttccttcatgtgctttgatttgtgtctataaatgcatgtatacttgggagcattggggtgtacaatgactggagggagttttgttttattttgtactagcatagcatagcatatatataaagtctgcctaggtagaacatagccctgtattatccggtattagccgttgtcatattatcctagcatttgcttcttctatatgtctttctagatgctctatatcataatgtagtctatcgtcgttgcctcagtagtaccttcctctagtaagtaaacatctctttccaaggaaggagacttgtcagctcttaccctctagggctattgccatatgagctctttggtacttgcaaattcgtctatttgattgtctctttgacacctccgccttctgatccgaggctaagtggagcattcggtaaagaaagagatccccatctcatcatagtcagcgacatgctattccaagcttgtacaagattacaagctacatgcacattgagcagacatccgtagatatattgattgtatgcaataacgagccacaaccccatgctaagtgaatctagatccctgactccatatctaaaaagaagatgcaaatatctaatgcaagcaagcaagaaacagaaaagaaaaccaacacctagcccaccaaccccaccaactccccaggccaacgctttgcccatataatagcgcgtggaggcattctcccaccaacaggcgcaagcacacggattttacccttgtccacgtcaacgtcggcaacatacaagaagcccatgatactcgcgtcgcggacttcagcgggggatgccgtggtaggcgcatgagtgatagcaaggagggtatttgccagagcggagggagcgggtggaaggacctttttcagcgggacgctgctgctgctgttggcattggcattggcattcacgttgtcagcgtgctctgaaaatgagcccacaacaccagggagcggggcggcccggtccgggtcttgctttgtttcttgtgaggcgtagtcatccatgccacccccgccggggaggaaggagtcgcctgttcccagttgggaagggtcgtattcgtcttcgtcttcatcgtctgccgaggagacgatgtagttgtatacggggagggaggcgaagtcaagttgctgtgcgtggggggagagagtaatagcggaagagggtgaagaggaagggatagggttgccgaagaagtaggagcggatttgggactcccgtgttgccttgcggaaggcatcgtcacggtcgacacagccaccggatttggaaagcttgacgacggagatgtgctcgtcgaagacagcggctgttgcgctggaggtgggcttgttatcatattgtctagcaacggtgctgtataggcgctccgaacccagtactaggatcgttgtaatcgagaactctgtgacaatatgattaatgagctccatggtgccaggcttgtctgtgccaaggatcccgggcgtatcgacgatgattcccgtttcgcgcgcatcctcgtcttcggccatccggcccgtgacagacaatgccagacgcgagacgactggtcggtacacggcgccttcgccatctagcgggctttgcatcgggtagctatacacaagcggcagcttgacaggtacggggctgggcccagacatgggactgcttccccagccgtcttctacgtccaagatggtgcggaaggcagtcgcggtcagtgtgccagggacgccaagcataccctccgtagggtcgaggttcacaaccaacggctgacgaccgatcttggtcgcatatgcagtcaagatcttagccaaactagtctttccggtgttttcagagccaagaagtaggacgcgcgggccatccttgcctattgattgggcttcttcgcgcattgtctctagcgcaaagtggacgtttgcatattctaccattggcgtttcctcggccgtgtattcgctttgacatcctcctgcgccgtgacccactgtcggtgtgactccatcggaggtagttgatgttgtttcgaccgcggtgacttcaagtgcacagccatgccatgtgaaaattgccgcctttgtgccggtgaatgtgtaggtttgcgattcggcaagctctgtaccgaagagttcagccgttccgttgagaagctgcacagcttgagtcagaaggatcacaatcagattagatgagataacatacctttactttgatgatatgtccaaaggcaacctcgaaccgccattccgaacctggggtcaggttgatttgcgatggtggcgcgggtgcctgcgatctttcctccgatggctgggttagctcgaggcctggaagtgacatgttactgatcaatttgagaaatcccagaggaaatcccagaatatgtgcaattattgaaggagtgaaagaagcatatcgggcggagctacagcatggatgttttacatgtttgcattagccgtttactcagctgtcattggctaaagtgattacctccagagaactccgtactatgtagttagacagatattgttaaataactagatatgaatggcttcagtgaacgtacatctgagagataagtaactggctagaatattcacaatgccccaatacgctgactagtcgttcctcctttggttcaatatttggctactacttcgtactccatgctcaaccataccttgaatagcactgggcatttattgcattatcacattgcataatagatccattagaggtaaatgcagcgacttcatccatatcatttttcattgtttgcgcccacatgcctggtgattgccttcaattggtaactaaccatgcctcacttcagcttcgagtagaaaaattatgtaaacattagaacattgaaagtttttggtatcagctaactataccaagattacatcaaaacagatgataacctacaagaaacataattggtaacattgaagcatatcactgtcattgagcaatcgtccttgactacttggagggcagtagaatgtgggagagggggaaagttggtatcaggagagcaagggcaaggggcataaaatgagctaaaggcaatccaaataaccaagactggtgcaaaacacagggagagggaggggaggcaagatattaggaaatggtgtcaataacaggcagagggcactcagaaccagcgaggaatatatttatggtaacgacaaggggaattgggcatcagaagcgaatatttgggtagctgggctgtcgcaagcgacaaacccgccgaaaagagaagactaaaatttcaaacaaactggactttgtcaagcaaaacctcattctgtttagaagaagtatgggatggaggccctatataggttaggattgattcgggatcttcgtggcatgggatgacttacgcaagggcaaaggccacagagacaccaaagatagaacggttgcggacacgctcctgcttgagcttgttctcaagcaccttggctttcttggctcgttgggaagattcagccgatgtctcttcatcgtcatcgtcctcggccttgcgcttgccagtcgccttgatggatgtcgactccacagtagcgccctcggcatgcgccttgatagcctcttccaccatctccttagcctgggcgatcatctcttcagtctccgcagcagatggcacttctgggagactaatgggcatatccaaggaaacagtagtgtgggtaaacttgacagcatcggtggcaccatcggtcagtaatacctcggctttctcatcctgttccttgatttcctccttcttcttctctttcttctcggccttcttcttctccttcttctcctccttcttctcctcttcgggctccgccgtattagatctcgttgacttgcgcactctgatcttctttccaggagatccgctcgacctcacttccatttcagcctccacagctcgcaactcaggaatcgtgtccgagaggcctgaagctgagatatctaatgccgactgaaggctagcgtttgcagcgattgtagacggggtgttagtgacatcgttggcgaggcgggtgctacgagacttccgaggagacgccaacctcttgctcggagaagcggaccgacctctgcggttgcgctgcgacacggggggctcatcggagggaatttcgaatttcggcggaggggtgatatgcttctttgcgctggaaggaatgtccgttgggtccaacagtgctcgcacccaatcgtacatttggtattccttggagagctcaagggctaggtatgaagtcaggctttgtttgatagagagaacatcccaggcagaacataccaaataagggcgagatccacacatttccagcaacttcctcctcgcttgtgtactcgcgagccttcagatactcacgctctgttctctcttcctcggccttcgcccatgggaatgcaattttgaacattccagtcgcgctaacaaagccatctttactacggcgctgtaatgatgaggcccgaagttaatgaccgtcggcctccaaaataaacaaaacaaggggtctcaccatcaggaagtagctttctgggtgttgctgggaggtgtgggaagggaagatctcagagccctcgagatccttgggcagcggagcacggaggtgagcatactcgaatacgcctaggttctccggcttggtggcatttgaggtgccaatctgggccgccttgacggagaggttggtttgtccaagacgacggcgcgcaaggagttcgtcatctgtaatcgagagtaacacgaaatggttagcgatggcagcacggggcgggtagatagccgatgcgcgcggtcgcgccaccacgcgccagtgtttgtacttacaagtgggagcaacctcgaccgtgatgagtggattaaactgctttggaagtgatcgcgacatggtggggatggatctcgagtgaagtgggaatgaatcttagaggatcgtgcgggtgttctttgaaggaaagatgcgccaacgttggccacgtagcaggcgcgtcaagcgataaaaatcaaaggatcaaatatttaccgaccgatcctgtatcttggtagagaaccttacaaccaaaattatgattgataacgggggggaaaaaaaaaaaaaaggtcacccaagataaagaagacaatcaggagagagaagatgcgagtcgcgaataatcattgcgtcgttctgaagcttgacttgttccggtaaggtccggtaaatgggtggtcatgtgtggtatttgaggagtctggttggccaattactctcagacacagtatcggatttactccactgtatctcatttggccccgtgacattttacatttcgggccaacatttccttctttggactttgatcttcatctactgggaatgcggagatactggagcatgtttacaggacattgtttctatatgtgagtgtgattatatgcactgtctccatactgcattgaattgcttacagaaaccctccctacttttccagggagtacatataggtatgtatgtttacatatctatcaacgcatcctacgtgctttatatagagtacattcttcgcaacaaacctacaatctatgttgtacatacatcctaaacgcgggcaactacgtatgtactccgtacctccagtggtctgatcatcggcccccacacctagttggggcatagttggggtcttacggagtatacatacgctcgtcccaattctcttctacaatccatacaatgctgtagaaagcatagcctggcccacacaatccaggcaatccaaactcctggccaatataagcgtgcaggatcaacagtgcgtaaacgtgcatatggagtactccgtacagaagtgggaatccgaatagcctcgcccctctcccaccgcctttctacccccaccaaggtctcaggagactattcgagctttagcccttttcactttcctttatcatttcgagtttccaatttgtttttcctttttcctcactgtccaacttaccccttttccacgacatcacttccccgaacttcaacccttggttcagtgcccccgctttcttaatctgtaaacaatggccgaccaccatgacgatgagctcgcttccaccaccactgagggtttcaaggtcggagagaagaagacactcgatgagtacaaggagctcggtacgttgagtgatctgcaatgcatcggcaatgtctagccctgatctccccagctaaccgtctttctttcccccgcaatagacaaggacgatgaagctatgaaccgttggaaggcgtctttgggtctcaactccggtgagcccattgccgatcccaatgatcctcgcaagtgtatcatcaagtccttggctctgcaggtcgacgggcgggaggatgttattatcgacctgtcctccccgggctcagttgacagcctcaaggataagcctttcaagatcaaggagggctccaagttccacatcaaggttaccttccaggttcaccacgaagtcctgagtggtctcaagtacctgcaggtcgtcaagcgtaagggaatccgggtcagcaaggatgaggagatgctgggcagctacgcgcccaacaccaccagcaaggttgactactccaaggaatgtgagtattcaaacctggcttctatttctatgttttcaagtatggcttttattaatactattccctattagtcaacgaggaggaggccccgtctggcatgatcgcccgtggccactacaacgccgtctcaaagttcattgatgatgaccagcacactcacctgctgttcgagtggtcttttgacattggcaaggactggtaaacatgggttgagagagctatctcgttgttattgagcggccgtttgttttcaaagcgtgatgagtttctttctttgacaaaactgttagagatgtgtcccactggggctgatgctttggattcctgttttattgtttatgcgtcatactaagtctcacttattggtgtatgatattttcatagataccaagtagcacatctagctgtttgtaaaagcgcagccttatcccgaactcctgtctagtgctagggttagaaagaaaaaaatttgaaatacataaacattaacgtcaatcaaacattaacagtaacagtaaccaatgggtatcacgagaagattcagagattcacaagaagtagtcgacaattggaccagagccatccttgctctgctgctgctggcccagctgttcaaggcgatgggcatcgttctctggtgcagcatcaaaaacattgaaaaaccgctcgccagagtcactcacttcgagcacactagccaggtttccacagcggtaacaatagttaggtgcactccagaccgtgctcaggcgatcatcgtaaagaacctggtagccttcttgacagagttggtgtgcgcgtaggatgtgggacatgctgttcacctctaggaacttccgcacaacctgcgctccaaaagtgtatccggcgccgcggggagagagtgagaattcatcgcgttctgtatcggggtcagaccagaccaaatcggccatgggaccttcgtgtggaatctcgcggaaacggtcgataatcttgatttggtcaatcgaatggatggaaggtgacaagccgccatgtacgcaaaatatctcatcgttaatcacaacgctcagtgtcaaaaagtcaaacatgtcggtgaagtaatgccagacgttagcgttgccatatttgcgcgcgcactcagtgtagaagccgtatgattgggtgactccgcgcgactcgtggttaccgcggatgaggtgcactcgttgagggtatcgtaacttgagacacacgagaagtgagatggtctccacactaaaaagtccacggtcgacataatcgcctgtcgattctcccatcagcaaaacttcataccaaaagcgagcaacaaatgggttcaagctgaggcctgcttccatccccgaacagagtattatgcgtgtgactaaccgaggaataggtaatttgtatcaggacagcggccaccgatcctgaaaatctcgatcatatcaaaaaattggccgtggatatcgccgaccacagtgactggagcagcaatatgtaccacattgctctccttcatcaagagttccttcgccttgaggcagattgcctcgatcaccgaatctgcgagcagctctttattgtagagccgagtgatgcactcatctagatcgatattcgctgtgaagcaataggttaacataaccacggagacaaccatatcatggaatcaaaaaaaccatgcacatacttggtagaccaggcattgtggcgagatgcagatacagtgacctcaagacaaatgagcggcaatgactccttcggggtatgatacttgttgttcaataacagagagctccctgtaccttgttcttgtgtcaaggtagacaagtgcagagagctaaaggaaagtgatatgcgagaggacggaggtcgaggtcgagatgggatgttaagaagacgatgatagaaaggatgggtgcgtcaatctagcaaaaagcatcctggtacagccgatccttatttccagtgcaaagtgaaggctctggaattaaagatcaagacggcatcacggccgaactgcgggatgagctcaggcacaagcaaggttatatccacaccgcctttattcgtacacgccttaatttcaaggccacttttagccaactggccactatgtactattatgtagacaattcctttctcggtcctcttggtcaacaattcagagtctaacaatgattagactcaatacggtaggtccctcggctatgggtagcgtggacatattaacgcgcaggatgataacttcaggtcaaaattctctcatagagtcccccgagtcgacgcatttacaagacaatgttggcacccgagacatcaacatacgtcctcatgaagtttttagtacagcaatatcggatactcgtgaagcgaaccggtttagcccgatttctaaacaaaaccatgaacgttggccgcattaactatgagcaaaatatataactagagtgggaaccgcttgttcctctcaagctccctccgggctataaagtagcttcaggtgcagtgaaacactatccaaccccggttatatcactgtttctcttgcctgtgtcgggcggagtgctatcattggagcggccatagacaccggattttaccaatccggaccctgcttccatgctctactgggaccatataactactggattaaatttatccggtgaaagctaccttcaaattccgatcataccgcaactatctatctatacttcgtaaggatgttatatcattcgacctggcttctcccgaagctggcacttaccctccatttttcagggcttaataagacagacaggcaaaatgtgtaacttatacatcgattttacgcgcaacgtagcttacatctgcacaacatagttatcaaattcactcggcctaatcgggtaaggcgggtgcgggtcgctgcgggtcaggaccagagtgggtccggggtatggtcccgtggacagggtcaatgcccaggtgcgatctgattgctgactgagcatcccgaggtctagatggataggtaggaacattactcggtataacctgagcacagggcttcctaggtgatgttttccaggtcagtgaccatcatctgaaaacttatctagtacaagtgagtagtaattaccctgtgtggtactcagtgagcaggagcggcagcaccctgatctgggaaatggcgatcgcggtcagaatttacatacaatgtcttcagtatccttgatatagcccagaagtgtattcactcttctaaaagactcaaacatctaccttgaatttgtcccaccgtgaagtggcaacccttccatccttgatcacagccagaatgtgatcctcgacttgatccagaatagtgatatcctccaacggattttgcttcaaaatcaatagatctgcggcaaatccctcattgacctgacccaacatattttcctgcataagaagacgagcggcattgacagtagcactgcgcaaaatctgcaatggagttaaaaccgaattgcgcaccgagaactccttgctctgagcaaagtgcatcgggccaagaagatcagttccaaagcagacggtcacgcccgcatcgacagccatcttcagtgtctctaatcccttcttaagaacctcctcattcttagcagcgctgtcatcagacaggaatttcatctgctgaaacatgacatgcgtaatgagcgtcggggtcaagaaaacatccatctcagccatcatcttcgcggtctcgagatcaacaagatttccatgctcgataccgcgcactccgagcttgatagcctgctggatcgcctgcggtgtgtagctatgactcgtgacgtatgtgcctgcattccgcgcaacggtaacgatagccttgatctcttcgtccgagaattgcacatgttcaatacggtccgtgggactcgcgacaccgcccccgcccatgattttgataaaatccgctccctggcgcagctcctcgcgcgcatacttgtagcactccgctgggccgtcgacaaccctgctaatcccggagacggagccgccgcagcactgctgggagttatgggacccgcgcaagtcgccgtgtccaccggtttgggagagtgcgtgtccagcaatgaagacacgagggcccggaatcacaccgtccacgacggcttcttttatcgcgaggcctgcaccaccacagtcccggattgtcgtgaagccacggtctagcatggatttgagcagatatggctgtcgtaggagactgactgcgtcgctcatatcactgtaggcctgtagactggattcaccgggaacgactgcgatatggacatggcaatcgatcaggccgggacataggtattttccgtcgaggtcgattacattttcttcggggacgtcatctgtgatggtagttgagccgtctgtcacgatctgaatgatcttgccttctgcgattcggactgtagcatttgggatcaatttgccctcggctgggtcaacgatggttgcgttcacaaagaccaagtttctttgagagttgggtttccagggcttgataatccgggagatgtccatatttgcagtatggttttgctgattttcttttggggtgggtgtgtaaagaagtagctcacccactccaaatggaaaaaccgagcatttcaacagcccgccatccggcccggtcatgcacgttgtgttcgtaggtgatgatgatatgcgggtacttgtacccgcatattcccattcagtcgttgagtgccacagttctccacccaggctcattacttctgtattggcttaacactttaaaagccagtacataatgctttaataccctattaatgcattatcaaaaagcattaggtgccctttatagctgaccccgcctatcttctgctactagtagacttcctctataggtacgtgggggtttggcttgtgcattgattatatgcattagataccgggtatgtacctatgttgtacatagtcaaaaacaggcgtatcaatcatcgtctatcttggtttcttctttaggcactctcgactttgaaatgcgggtacaagtacccgcacggcaaatcactgacctatcacaatatatagtaccatggagtggtacaatatatatacatggtatttgacaacaatccctatctcactaggcaactatatccctgatgtagtacagtaacactgcagcataaagcaacaaagtatataatggcagtccggggagtccggggagaccggatatagaatccccatactgtctcagctatttatgaaccggttctgctgagttcattgattattagattctgtcatttacttgctcacattggatttggctgatctagctgctgcttggcgttctgattctcgccagaggcagatatgggtgggagtaatctagctagacgatactttctattacgtgctagctaactagttactgaagtagttactggagcagttgctcaagcagtttctcaagcagttgattaagcagttaataatgatatgacaaagggggcttgattttattattagtttacatacaaattgtaggtacctactgccttactattaccaaccatatggcagggaatatgcctaattgtgaaggcggggagaatgaaccagtaagaaaggggcttttcgcagcattcgaaattggaatcagtcgcttcgctctgcaacgactatctggaggccttaggtcgtggagatcactagtaagaaacatccaagatgccaccaaacattattcagattcatttcctcatattttctcatattttcaatatacccaaaaggttccccaatcaagccagcatctataaattcggacacgtttaaccaagcaactgctgtgcctctttatgcacagcttcggtttcggaatctgtctcttcttcagagtcatcatcttcttcctctgagccagattcttcttccgaatccgtctcctcttcctctgaatcagtttcaccttcttcagaatcagtttcagactctgtctcagtttcctcctcctcctcttgtagccactgatcaagggttttcttcccaactaggtctacaggcaaagccggtccgtttcggcttgggatggaagtgggcttgtgttcgcgaagtgctttatcaaggcggtcacctgcagtcatggcggtggagtcgctggatgtgtctggtttcacatcttcgatgcggaggctgggatcgggttcttggcccggctcaacccagtctgggagattcgtgtagcctcgaagtccgtggtaaccagcgtcagggccgacaacgagagtggcggagccgatgagcaggtccttgcgcgtctcggatgggctgggagcgtggggaactggctttggtgccaggagaaggagattggcaagttgggtggaagacggagtttccaggaggctcttgtagagacgcgcccggtcacgcaggtcgtaggatgtgtcgtaacgtgcaagaaggaggatataccgccataataacgtgatacggtcttcggttgcttcctctgtttccttctgttcagtgccgtcgtgttcttcacggctctcctctccctcttcgacccgctcagcatcttgcggttcctcgttcccattgtcagtccattcgttgtggaactcttgttgggatttggctggggcttcagggaatgacgacgatgcaggttgttctggctgctcctttggtgggttctgcaagagatggtgtaaatacaccttggcaccaagaagaacagtctgctgtttgacaatttccatctcgtctgcgaatcctttgatcaatatacggagcacatcaggcgcgatattgttctctgggtcaattccagcgaactcgccaaccagccagataatagtggctcgtgcgtctggatgggttgttgaacctaggtgcttgacgagctgaagaacagtctttttatgtgaagctggatcttgttggatcaagtgacgaataacagtcagtgactccgacacgaggttgccgtccggactagatatctggccgagaagaatccgtagacacatgcctgcggtacttgtgtccccttgcgcgcatcgcccaatggctcgtacactctctcgtaccagctccgggtctgtgtctttagagaagtgctctagttcgctgattatgacccccttccagtgttttccacaatgcgggaacaagatggttagcacctccagtttgaggcgccagatatgtggggggtcgttggcgtggacaaggaaatgggccgtgtatttcgcaaaaggcttaggcacccttagagcaacggcaacaatgttgtacagagcgatgagctgcatatcctgtggtgttcttaaaagagccacaaggggaccaactgctgatgaaatatattctgatggagcaaggtaaaggaagcaacggacaacgctgacaatgacggcagagtttctgctctgcagtagaaccttgcaggctcggagtagaagctcaagatcaggatccattaccgtaacttcgtactcttcaacatcattctgcgtctcctgttgttgcttttcatcgtcgtaaaatgcccccggggctgtgcgcttaaccgtctgagttcgttgagggaagcattttcgcgcatagaatgtcaacaagcgcaatgttgctagctggccccattcatccatatcgaccagcttcttgactaagctgcgatagtgcttgtgaattatgtcaatctcatccggacacagatctaagaatgccgcgactgcaggcccgacgacaaagtattgagaatcgcccaaaagtgtctcaagataccccatcagttgtggcagtgtgttcgggtccaatcgataacattttgggatagccaaagcggccgctttgcgcacgtgtggactcatatcaccacatcctctcttgatggccagcgacacaatctggctgatcaccggaacccggattcccgacatggtccgaagcgccattgttcgaacctgcgggcttgaatctgtcagcgatttctggatcgcattgatggacagtagtgccagatccggctctgcctctgcatgatgaaccaagtagatgtaaaccaatttcttgacttcgaggttggcgctggccacattcttgacaactgctgaaaagaaagtaagggatggttcggatcgatacatcaactagaacaggaaattgagtcagccattgcgttttccatagttcttgttcacgatcctcgtaccgagatgaccctccgcattccatccagaacttcccgctcatggcgactgtcaaggagcttcttgatgtgcgcggggctgtatgttcgcgaagtataatcggtgtttgagatccgattgatagcagcggactgggcagcctctaatgtgagctctcgggctatgcgcacagtgacgttccacggtcagtttaggccaaataggacggattgcaacccaatccgacatacctgtttccagcatcgaggatatcctggaaattgtttccatctttccagtttctgaatgcccagtccccaagggccttggctgagttggagggaatgggtgagaggtgaggggaggaaaggcggagcagctccgcggaagtgaagtggacgatgccgtaactcttcaccccgatctgcaacgttctgactactatttacacaccacttgattcattatctacgactaccatgaccatttgtgtttgacgggttatgagttgaagacgaaatgatccatctctcgttgatgacctcggaggggcaataagtgggagctgaacacagctatctgaaccaatgggtccaacatgcacggtcgctcactgcgagttggtctctgacctcctgcagcaactacttgaaggcaattcagatacgtaccttattgtctgcgcaaccaaagccgagttcctagttcaactcacagcagccatccgctcacaatgcgctgatccagacatggccgcgagccatggcctgctcacgaaaacaatcgggctgcttgcaagatccagcaaaatacgactgttattctgcccgagcttagagtctcttcgggcataccttgccattttcgatactgctgttggcgtagctaccgaggaccgatcgcttgcccatgatcgacaactcattgctgtccttgatatgatagctttgcatgtcacaacttcagagttctcggcacaggggctttcaagaacactcgcttctcttgttgaagcttcctccagggcggggatggatctccaggtttatgaatgcgtgaatgccctggacccttcaagtgctgttcgggggaaaatgctatgggatgtgagcgttcccttactgaacgggtcagttcgaatgcgatcggatcaaagtatctggagtggacggggcgtcaccgtaaaacgggttgccgaacgctggtttgaatttgaccagaactgggaaagaatggaaaacgcttaattctgatatcagagatgatattgtaacataataaaactcctgaatttgcactatccgggtatcctgtagctgaccgctgaactccgcacataaataacaactgattgatcatagagacttctccatctctgtcatgtacagcttgatatgtgactctaactttaggtactgatcgtgggctgactgaatctcggtctcaatgttctccttcaagtcaaccatctagaagagtgggttagcaatagttcatcacccacgacacagggtaagacgtaccttcttctctgtctgttcaatgcgaatacgcctccgctccatatcgcgctgcttctccgcacgctcctcgcggagctgtttttgcacatttcggagttcttccatgcgtgcctgcgcaagttcggctttctcctgtgcatttttctgaagtgcctcgatgcgctcgacccaacgggccagttgacgctgcaagagcttctcggtctgctcgacctcgcggacgctgttccccctgtccgaaatagcctctgcagttctagcagcacgagactcctcttcatcctctttttgcatctcagctgaaatgtcatcgagcaatttaacacatccctgcacatcattggaaaccacggtgaacgtatccgaagaggtctgcagtgcgcgtgctcgcctctccatcgcatcaatggaggccttttcgcgcatcagattctcggatagttcagccagtgaggactggaggctggccggagactcgagcacataaggccgcagtttctccgcttcttgtcgagaacggacggttcgttcggttttctcttccaattgctgctgccgccgagctctttccgtcttaactcgatcaagtgtttctgcgactcgcgactgctcccgacccagttccaatagccgcgccttaagcgcatcgtttcgggaaactttctctctcacattcgcttcattggattggagatcctgccgcatttccctcagccttaattccatctcctgattttccgccagaagttcgtctatgcgcgatttcgttttttctgtcttgttaaagtgctcgtcgatcacaggtgtttgcgattcccggaatcgaacaaagttaatcaagtacgagaatattttgacgagtcgttcatgcgtcggtttggtcaggtctgtgaaggtgaagtcgttgacaccgcactgttttgtactataggcattagcatactcttcggggcttttgtagctagtgatgagcagatacctccgccaatagctttcgcagcatcataaagaaacccatgaggttgcgagtgtcattgggaattatatcagggtagtcgccgcatagatcttctgcagctgcatgcattgcgggttccactgtctctcgagtcgtattcatgagcagttccgcgaaccattcgaacaccatctggatttgttgggcgtttggtttagccaggtcggcgagggtaaacggtataccgatatcgttgatacatcctgcgatctctttgtcgggctatttcatgttagtatcagacgaaagctccggcaaaaatcaagctcaccaagcgcatgagggcgtcattttcgtcctccttcttgcgaccccgaccgtggtgctggttgccttggaattgctggctcatacggctgttatatcccatggcggtagagttgcgcgacatgatagtctgagaacctatcaccaggcaaggggcttattatcgaagtggataggctaattgttgttgatcggggctgattgtttactcggagacaatcccgcacgacgcccgatcggggttagtgcctggaggggcattgtgcaaaccagacaaacatagaattcatgactctttctcttccttctacattgctttgttcccactcctacatcttcgacgctcaaacagcatggcttctactacttcagatgcggctgtagccgatacgaaaccattcgagtaagtaaaacgcgctccctcgaagcgctcgcacctgctcactgttccttcagcattgtcgcaacctacaatgaactcctccgctccgatgccgacctcactatgcctattgcggccattgaagctctggttcttcttctcacacagtcagcctcttcaacgatatcagagactttggatctactcgaaaaatccaccgcccacctgaaacgctccattcccaaccccatcggtctatctgccggaaccgatcttttccaacgatacctgatcaccacactacaacgccctgggcaactaggtcccgcgggcgatttcaaggccatccgcacacatctcttgtcaaacggacggctgtttatccgacgcgccaaggaaagccgagacaaaatcgcagcattcggccgtggcttcattcgcgatggcagcaccatccttacaaacggtggctcccgcgctgtcgcagcactattgcaaaaagccgcagatgaggagggtggccccgctgtgcggttccgtgttatctacgttctctcttcgatttcccaggattgcaagcagcccaatgaagaaccagagggtatggaaacagtccgtgctctgagagcgaagggtgtgccagtttcaacaattccagagtccgcggtggcatattccctcggcaaggctgatatggtcattgtgggtgcggagggcgtggttgagaatggaggcattgtgtctcgcatgggaacctaccagatcggtctcctcgccaaggctattgggaagccattctacgtggtagcagaaagccataagtttgttcgcctgtaccctcttggtcagtacgacctaccaattgagcagcaagttcttgagttcaagtcggaggaagaccttgaagaggagcgcaagcagcagtcctctgtcactaagacagacggagacacctcaattaagctacccctctgtgactcggttgatttcactcctcctcacttgatctctgcactgatcacagatagcggtgtcttgacgcctagtgctgttagtgaggaattgatcaaaatctggttctgaagaaaagacatgtgatagcaaagcctttctgctattaaattccccatatctcaaaaactttcattccgatgatatggtggggaataatttaatgtgacacctgcatctcatgcggccctcccatgtggaaggatcatctcaagcgagcaagatgggattttccttttcacacgtccaattcaatgtggatatctatcacattccttccagtgtgcagcacaaagataagctgcaggacgtgggcaaatcacacccctctctttcctgtcaatgaacaccttgacataaatggaagtggatatggaatggtttccagttgagggttttttttcttgacaaagggcttggttgaacgcaaaaaaaagttatcaacaaattttctcaagtcttttagacaaaggacagaattgtagtctggtctcctatggtatcaaacgtctctcaaaatcatacagtcatcatcatcaataatcatcaaagactctatgttgtagttgtagcggagccccttcgcaatctcatgcgttaaacatcatgtatggaaccctcggagggtgtaccttttatatggatgggttttttgtccgagcctcctggacgttaagatatccagcctcatatctcttcgcctctcggttcatcaaaaagacagtcgtaggaatagtcgtagatcataattcataattggccattcgagtctcccaaaggaatagctcaatccgcagccgagcatggaccgaattgtcacaagacaaaaattgaaccgaggcggtcattgtctcctaacctgcctatcacaccatggcaaggagctcaattggcaatgcggttgctgataacacaccattcctgtgtttgcatcccagcgaacgcatacagcagcaagtaaccaagagccacgaatatccacaaggctgccatgttggaaggatttcaatcagaaagtcggtgaaggtgaatgggatttttatgtgtgatagacgataaaggattcgaggggtatcagacgaccacgacgacggggtcaggtcaatggtgccagcgtttggccagtggagttattgtgtgctcgggatgtatgctttatagaggtaaggaggtttatgagtaatgtcaggtgctctgttagaagacataggaaatagagagatagagggacttttctctgggatctcatgctctctagacattttaaacacgaccagaccgacaattgatagattctagagtgtttttctatcactgacacacttccttccggtttcttccatccaatacgaatgcgagctgggcagtctgtctcgtccattaagattccttgtcggagaaacagatgcggggttcttgagaagattattacttcacacgtctcgagatatgaaacagtctagatttctgtatgtggcatgccgggaattccctttctgagtcatagatcacatatccatcacggatgttgggtattaagacggacgttggcatattccgccaattagggaccggggtatgatcaattggaaattattgggaggttcaatcagtcattagttgtgcgccttgcatccccaagtacatcgtgcatttctaccatagttctgcgaatactatcaagtgatatagaactgcgcccaacacctctcacgcgggcctacatgcatcctccaggaacattaatacggaaattatcgataggcaacttggagggaaccttgagccatatcacagtacaatttctattacaatggtgtatgtggtctcaaatatatatcgtggcctcgtaggtgatactatatgcatgtatttttgtcaaagccctgaatcctgaaacagctatggatcaccatcagactctgcataatcatcgtgtcacttgatatcgagcaaagatagggtctaagccgccctgatcgccaagaacgcctagaacaaccggaagtttcaagcggccacgtcgggttttggagggtgcagctgcatattcaccaaacgccctgaatcctgagtgctctacaagaaagagaatatcgagtcatcccaaggttgtcaacctcgtagagatcaaagaagatcatcaaagacgaaaatatctcatcatgccccacaagatccaaccccgctatccggtccctaaccaaaccagcaccaacctcacctccacccaaaccagagaccccaagggcccaacaccgaaagcatactagtctactcaaacaaactatacctgcatctacgcgtgagatcccaacggccatccgacaggtgccacccccgctcctcttcaacgctataccacctaccttacccgcttgccaacacccaaaagcaaaatcatggatgcccaatcgcccacgacaggctcccggcctaaccagaagttccacctaggatccgaaacccaaggtaccggtccgcagtcaccatccgatacccactgtcatagcggctggtctatcagacgccttctgggccgacgtgggagccgcaactacagcgttctggagcgggagccaaaccggctgaggaagcgcatgagcaactgagtttcttttcacggatgaagggaccgtatcggttggcgatggtgatcaattctggtatcggtccgcgcgcatccgcggaacagaggaggatatccataagccacttttgttgttggatgtctcatcgagtttttggccgtttatttttcctcccggggtcgcatggaatgcgggtctgcatcttgtattttcggcgtttggttagttagcattgggcgggtaggggcatttttttgggaggagtctgtctcatctatcttttttttttttggattgatctaataattggacgattatactccgtaatgcgaagtcattggttgccatctgagttttcctggccgacttcggtatcttgcggtggcagttgccttcgtggcgaattctcaatggcttgaggagttgccacgactttttcccgggtattaactttggaagggagatgatcgttttaaagagggcaatgtcgagaaacctctacattgtccggagtagagggtaggtactgaagtggtgaataataagatcgggaatgagatcttccaaatgcttataagcttacgttttagcgaaaaccaaaataaaataccaggatttgatggcggctgtttgctccttgcagatttagtggctgtcctgctcaacccgattctgggcgttgtctctgccgttcttggcgtctacgaccaaacagtattctccgctgtcagatcagactgtcagatcagacctaactgagcggttgaccgttgtgatcaaaatgcaggaaccacggtggaacaatctgagaccggaagtggagtggtattatattgtaaaatgaaaggtatggagtatctgtataacatagcgataaggtggattccaacagtatggagtatacggagtataatatacatacaacatagatagcgatatagaatagtaccgagatatagaatagagggtaatataagcaaggaggagctctagacaacgccctggatctaatcagaaccaccttgaattgaaaccaaataatagcgttgacaccttgcaacccgctggattctcaatggatataattagcatctccgtattcgtacgtcgcactggtttgctagatgtctttgaacgtcgatgatattgaatagaaccgagggagagattgaaagacaatgtaactataaccattagaaatagaattagtagtaatcaaatgtaatcctatagaaggaactaagacccccataaatgaaactcgccgatcatttccgtattcacgatacacgatagatttccccttacaatactactacatacatatccggtactatttacatataactagtccctgcaggtgctcaccaatagtcttgaaatgggtcgagaaacccctcccaagccgacgatttcataggtccgaatgggtcaaagtgcgtaagatcgactccattcccgcgtgtcaaaccaacgaaagggctaccgcggactcagttgggctccaccgggcgtttaaacggctggctttcccgcgtgagagggcacgaggggttagcatgcattgggctttggttgtacagggtcaagggccgatattccactcatttccgagcttgccgtatagaagatcgatttagacttggatgtccaatattgcagaggatccccccataatgtacttaaagggatgcatgtatttataacactgcgtcattctggaacccacacggagtggatatcccttctcccccacaggtcaactgccaatttccaaaataaatctagacttcgtgtgaccagagactttttaacgagattgtttacaccctggggaccaaggtaccaggtacccgtgcaactatagaaccaagcccgaagagaagatgtatagaaggtgtatagaacagatcatcgcaggcaaatataaaagaaaaaaaaaagcaaatgccaagtcacttgtttttcaggtaaaaaaacaaaaacaaggccctttttctgagttccctttggccctttgggctcgtattttcttttttttctgcctttctcaattttcatttcatttcatttcctttctccttcctctttctctttctctctctttccctctcgttgaacactcaacttctttcctttcccccttcataccccccatggcgcctgtggcatcgcactgactcccagtcattttactcgactctcctttccaccccccatgagtttagttagactgtcgcgccaccgaaccgataacgataactaatcccacttgtccctgggcaagtgcccccaaagtgccatggcgatatggccctttaatcgcaagagcaagcggcacaccatccaagtgaccggtgccgaagctgctgaccttcgctccgcctttgctgatccgatgatggagcctaccctgggccgcaaaccatccaaacgccatagcaaccgcacgacacggacggatgctgcagacagccggcgcagctcggccctcgtgccgtcgaatcgacctatctcatcgttagaccgccctgcttccattgccgatcatccacggaacgcgccacgcgaccctgcgatctcgagaacagcttcgctgctgaggcggaagccaagccaaaatgcaaatgcaaatgtcccgaataagctacgacggaagctgagcaagcggaaggcaaatgagatcatgcgcgagcgtgagattcgtatgctctcgtcgacccctcccatcgatattccccatcgtccgactcttagcagcggggaccatgtactggaaagtcgccgccgaaaggcaaatggtagacgtgccgaccggtacatgtctgacatcagcctcagcatccgtgactccgcctcctctaggtctgacatctctgacccatacacctataaggtcaacgcttttgctgccctgactccacgccctgttgttcgttacgtcgaagcccctcgcctccaacccgacagaagtaccaacccgtctgcttccagccgacatgacaaagagaggctccaggccctgaacatgtccgaggaagatttctactattccaaacgacgagtaaatgaactcgctgattcattagatgctggggctttgagagaattgcttgaccgggaccgtcgccgccgggagaagaagcaggtcgtcgaccaggaaagacttcgacgtaagctgcaggagagggctgatgctcagcaagcggaggaacgaagactccaggccgctgttgaggccgctaccgaggccgaaattgctcatcccgagcctttcgtcgctgaggtcactgaacccgaggacgttctcccgaacgaggaaaccaccgcccctcaagttgataaaccgacggtcatcgcaccggagaatgaatcgtggctgctgggggcttccaagagcagtgagcacaccggacgcgaatcgcgggaaagttctcgcgtagttgacgatagttctattcgtgaacggagattggttcagcgtcctagtttcgccatgtcacatgacatcaccatgtcccgaactactctttccccatctcattcatcaattcgccatgggctcaattccccgagccattcacaagtcggtggacccggctccacatcggacgtctcaaggggggttgattcagaacgtcgactttccgacaccagcggccgccgggggaataccattacttcgctgttcagacgtggttcttctcgtctcaagcggacatacaaggagcgattccacgacactacccctgaagtttccaacgcctcgcatgaatctttctacaagattcagacccaatcatcccctcctcagccctcggtcatccctccgagaattctaatgcccactggaaccgtgaagcgctctcaatccaagttcactgaacacttcggcgatgaaccactgtcgcctcctgactcgcgcctacagtcgccagatatcccggaggaagtgctagagtcctctctcgagaatgacgcgactttcctgcgtgaaccaagccctagtcccggtgtggacattaaaaacccgaaccgaagtcatcatcggtcgtgggcttcagatagtatggacctcgaggccgataatgtgccactttcccaatctctagcttcaattgactccgagggatcttggatgtcaggccagtttttccgtcgcatgtcacaaaagcccagcagtcctgttcgatccaatttgacctcatttggccgagactcggtagaggtcccggcagatgcttccgaagaagttgaatcactggatgagtcccaccgtcttagcacaaatatccttcgcgatccagagttcgaaccggaagcctctgacagtccggcaaacattgtcgctgaaaaatggcacagtgaggtcggccgccgccctgttctagtgaacccagtggtccgtcccaagtctacacaaggactgctcagagggttctcttcattgacccccatctctgcagaggaagattacattgtggaagagacaactccttccgggttgcagcggattcccagcgaggaactcaggattggttatgccgaatagactgagtattagtgatcaccatcgccatttaacagcaggatctaccatttatcattacatcatctgtgtcttgtgtcatggcgtgttagacgggtaccactatgcccatcgactattgccatgactcagatgcagtctgccagaggtcgtttgaaccttccctttgtacgctcttttgtcactttcctttgtcaaaatatccatccgtgagccttggattcatcctctggccatctgtacgattctgatatccccatcgccttgtatccatttattgcccttgcgagttcgtcattctcattcgatttgttgatacccctcgtcgccccgtgttttatctttaccatatgcataaattcttattccttcctattctttctgtcgaatacataagctgataaatctttattccccctcaagcgcttttcttcgttgcacatagttggccgcttctggcccttttctttcatcgctgatattccgacattcttttgggaatctactgatttgaggatcaagcagtgtttcttatgttgatgaaaatggtattctcgaggttttccttatgtatttctatcacggtccacaggcctttgtccatgagaagaataggattgagcctattttggtctatagcgcccttgaagtctctttaattctcatttttcaggaataaaatatatgagttatgtctctccgttctttttgggtcccagtaagcaacatcacctaagaaccgacaacctgcttcgcgtgggtatgtaggtataatttttgtagttgtgcatatgcagtgtgtaattagttgcaggcccggaaatgctgacagttccagactccatcttattcgtaagcagctcgaggtcaggagcacgtcatcccctatcagcttcacttctcttggatcccagcggcatcgatatctgcaggtacaagagaatacaacgaaaagtactgacaaatcccactatggtaagtctcaattgggatcttctcaacccttgaatcatcccagtcaaccccccagcaagctccagagacttccggacctccaggacccccggggccagctccgatttattattcagcgcggccttacctaatcgcctctgctgggaacgtcatggccctataaaaacccagcgcccctcattctacccctccaatcgaaatacttatatccactccagttcaagccttcatctcttcgttctacccccagaaccatctccggactttcttcgctactgaatcgatcgattcccgtccagcgcaccgctttccgacccttctcttcaacacctatcccacgcttcacgccttcttctctcaaaatgggtgtcactgctatcaccacgtaagtgcccagcttgactctcatacatacccgtggatcctggaaatatgttctacgcattcatcctggtcctttccatttcgcaaagtatgaaaacaccctagttaacactcctccttcttctccagtgccgaggagtacaagaccaaggtcactgatgccaccggcctcgttgtcgtcgacttccacgccacctggtgcggtccctgcaaggccatcgctcctaccctcgagaagctcagcgatgcccacaccaacgtcaagttctacaaggtcgacgtcgatgacctcgccgaggttgctgctgccaacgctgtctctgccatgcctaccttccgcttctacaagaatggtgaactcaatcaggaggtcaagggtgctaacccctccgccatccaggctggcctcaaggctatccttgcatagtttcggaaattgagattcattcttgttcatatcattgatctatgatcttttttttttttggagggttgggtgaattaattgaatcctgaatacgtaccgttccacaaaagtctgtgtctatgatgtaggctattcgtttgctttttcttctcaatcggttgtttgactttgcttggaagctaggtcggctatgcactgtgctttacatggtaaatatatgtacgtaattgaagaaaagagctacctggaacttgacttttgaattagaaaaaagaaagtgtctgtcctacagcttgcatgcagcttgcatgcagcttgacaatcaacccgcagtgaaattccccgcagtttctctatataacatcattggtgtttatatatgctgatcacttgagtccgaccacggtagcgtttcctccatttccatttcaatatcaaagtctgattggttccagattttgacatttatagatatatttaagacaaaaatagcaggctgcttatactgcattgtcctatttacttgttttgtttttgtggttctcaagttttataggtagacggtagaaaaagccggaaaaatgcataaattatgcaaacagaatttctgtgtacccaaatagcgtaagtcaaatgaatgtggatttgggattccggaacatccatctctgtactccgtaaatgagtgaggatatactaggtgtataacaagtttacaaatatgacaaacagctatagaaaaatggtcagtgtgtgaaagaaaaaccaagtttgaacttgaactgcatggcgcagatgcaaacaaccgagagaaggagttgtatctgtaggataggacgacaaacaattcaatggctgtctatataaagagtggttgtagcttttccatcatctccctttccatcatccatgtccatccacctcctgcttccttcaagccatgtcatcaaagtcttcaagtacggcgaccatggtcagtgagatgagtgacgaagatgagcgcccctcggaggcgtttgaatcggagaacttgtcataccgcaattactacccctcagaacatgatcagaccttcaatactattcaagagtatgcttcttcagtcatcaatttctgcgcatcgtcctcacgaccgatggacctcacattcacctccagggttgcgaagcaccttcagagaaactcggatttgtttgtgatgattgagtactacgatgaatgcgaccctctcggtactcttttcttagagtcatctcatcgagatatggcccaccatcgatgcgccaagctgggaatcggcatgctgaaggagttccagcattacgaaattgaggcaatccagtgggctttgaactgggctttcaacagagccggcctacatcgggtggagatgaatattccatcgtggaatatgcgactgggcaaggtgtgcgatgaggttgggtttcagatagagggaaaaaggcgggaatgttttttcaaggatggcgagtggcatgacgaagtgaacatgtccatgttgaagaaggactgggtgcaactccgggcctagacgaagaggtcgccatactgaaagtgcggtggtacaatggatacaatgcaggatgccttctatgattcaatgacaagtctgacctcgattcaattttgacttttctcatcaagtaatttcagtaagagtaagcgagagatagtttaaagagagaacgttgaagagacagaactgatgtataccaaatcctgcataggcggcttaacgtctagctatccccgaagccactataaagtcactgtgcacaaccacgacagtttctattacctatcatatttatgcatcatagccacgcgattgacaactgacagcaaccgttcgtgacttcggtccatttgcctcgatggagaatagtagatccatcacacccactgagcatgtctggagtaccaaggttgccatttagaacctatccactacatataagaaagcgggcaaagaggcgttcgacagtcaaagagtgtccaaccgagccgacgcggaaagcagatcgatcagatatttttggctgtgtttgcataaacctgctttgaccttggttcctatgattcatcgagggaaacggaaagaaagatacgccttcaatccgggaattaatttactttgtatatgcacatcttcaggaaggtgggactgcaggcccactctttttttaatctccttttgatctcttttcctgttcggatttcgccgaggcaaattttcttgtgttttaattggctgctagtcctgctatgatgcctttcatacaatatactttgaatttgcaagccgtgcgatccaggggcacatccgatcgccggcttgctcttattttgcttctggtttgagggttctcggtggcgttcccattgtccaaggaggctaatgtgatcgatcaatatctttaatatgttccgacgaacggtcgactatgtacggagtaccgaccgagcctggagtatgtatatcacaatatttaagagaggtccaaatgaacatcacagtgggccccgctcttctcacatctggcagctgaggtgcagctgaattcgcttattagctcggtccacggttccaacaattaatctaaatggaagctcaaaccgcagtgcctgggtaattctacggagcagtaaatctagtttccatggttgatacaaccccattatcggagttatatcaaacccaggcacggaaaagacatcctgtagataaataaagactaagatccgatgccattggcgttgtattagggctccgatacgctctgaagccaccccacatagctctttatccatacagatccgatctagatctgcccaaagcgaatcaacacgggaccaaggcatcggctgcaataccacatccaccaaatctaaagcgggctttgcgaccttgggatctaatttattagcatgaacttattctactaaaatcaggcctcggcattccctttctggattttttgctttgttttggtgtatgccacgcgagttgtgggtttaggataggtttaggatattacttgcaggccaatgaccctgtcggtggagatcacgtctagatcggacggggctcgatcgtggtacacgtcagttcatttgttaccgtggactagaggggcgcttgggatggctagtctaccctggtctaccctgatgttataagatgtttacctcgagccctgttctactgatttggactttgtgttatttgataacttttgttttgctctccacactgatactaggaagcgatttccatgtcgtcttgttgatattgattaatacagtcgcttccgactatcttaccctaccctccaactatacgtgctacttgccaatgtgccaataacgaaagaccaacacttattctctttctttcacaatgtcgacgacagacgataaaccggtcgtgcttgtcacgtacctggcggggtacatagttctttcctatgtgatcagcgcaatgggatgtgcaaccacactggagctgctccaccggcggacatcgaggtccggtctatacaattggtatgcccaaaaactctaccctaccaactcctgcacttgaacatgtaactaaccaaggaaaattaaaaggtaccttctcctaacctcgtcgatcacaatgggtggcattggaatttggtgtatgcacttcatcggcaaccgcgctatcgtcctgggcgacggccaggcagacgtgcaagtcttatataacgtggcttttacgggtacctcattcgtgctccccgtggtagtactgctatttgcattctacgctgtgggcgtcgaagagaaggccggctatcttcgcatcctcatcggaggcttgctcactggtagctctgtctgcggtatgcactacatcggtcaactcggaatctcgaactatagatgctcctatcacgtcgccaatgtcgtgggctcggcgatcattgctattttctccagtactgctgccctaggcatcttcttccgctggagggctacctggactgatagctggtggagacgaggaatctgtgcttgcttattggcggttgccgtctctggcatgcattggaccgcggccgttggaactgtctacaaggaccacaaccgcatggtcatgaagggaacccagttgtcgaggagtcaggttgtcattgtctgcactgttctggtatgcttgcgattgctttgaagatatgggggattggaaactgacagctctctaggcctgtgttgcatgtgtagtgttgtcgatgtgcgctgttatcgctgggcgaaatcgcagaaagtcgacgactcgtgcccatcagcttgtccttgcctgtgcctactttgatcccactggacgaatcatggttacaacgcaggctctgcttcctacgagaaagattgttgatcattatatcggacgggtatgtccctgagccaccggatacagcagaagtcttgactaacgaattacgaactagacattcaaagatgacgacctcacccggactcaccctacattcctgtgggcatttagggcaactcgaaattggcccgttgtgaaagatctagtacccttcatgcgaaaccgccttgattccgaagaaagtgccattgagaaacacatgctatcgcgcggagtgtttatggacaaggatacggagttgcaaactgattttgataccttgttcaagcaactcttctgtgtcacagcccaagagctctcggatgaactgaatctgcctctccaggacctaggaacactctacgacgatgttctctctactgctatccccgtctcccgactttctcgagccatgggccgctcttcgctccgcactggcaagggtcaattgatgttcactgttcgccagctacaaaaacatgaagcagcacgcttgaggtcacagggattccgattcgcaaccatcgagcatgtcaccggaatgctttcccgacgcatccatgttcccgaagcaaacctagccaactccctccgcgatatgcgagactacgcaagctcgaatcgtggctttgacgagggagtacacctcatatccttcatgatgcgcccaacaatccacgatcacttcgagatcctcaccgcaaagggtgtcggcaaccccctcccatccgcaaccctccccataaaacacctcgaaatccaccatctagaactcatatcccacatggaaggctggtccatggacacatgcatgcgatacctccagtcagccagcgcagggcaagccttccccaacctggacgacttccgcgccgagttcatccaggccatcatttctctctcgaaaaccatcccagaagacctgcgcgcagcagcgcaactttccgctcgcccattatcagcgccctgccgcagcagatcccccaaccccgaaatagcagtacagaaaacctgcaccctcataaccttctgcgtcgtcggcacgctcgaaactcaagtctccaacccagactacaccttcacacccttccgtctcttccgcgtccagcaacagataaacgaagccctcaccgaccgtgacgatttcgcccgcgaactaggcgacgaactcttctgcacagacgtgcgctcgggatcgaccaccagcgagagcccttccacggctaaactggccatcttgcgtctgtggccgtcacgcaagcgctcggcgaccttgagctcgcaatactcccaggagtcgtttgcggatcctactgcgactgcgttgcgggatatcactgttcgcagggaggttcgcgttgattttacccacctccatgagaaatcaaatcataatgtcagtgcccgggaaacaaaggtggttgttaccggtggtggtgagaatgcgcctacgacttatgtcgatgagttgtatagtctttgctatgcaccgggtatccggatgagacctgatgcgtcgttgcaaaatatttcgcgtggatcgactgcatgctgatgacttttctttatggtttgatttcttttgcgttatggctggcgtgagttggaatgtatacgggaattgggactggtcttttatgatttgttatgtctatgcttttcgtgggatggtttaggattgtatataattttctctttctgacgagtatatagatgatatcaatacaaacgcatgcatgtttcatgtgtaatttcagcttttccaaagtcttattatcaataaacagccaaaatagtatttgtcaacacatgagatgaactctagtaggtcacagagaaaaagcagaatatcgtcacacatcaagaatagactcgttaaccaatacatgcaagagatgtcatgtactcattacttcgcacctgccgagagcgagtcaggaacaaatgcagtctgaaaagaagcactggccaatcaattgaagatcctccaatccaatgcccatacactatagagcacagatcccacggatcaggcatcaattagcattaggatcctcgcgctccaagaacgaaggatctgcctcaatgcggcgctcgaacttcgcccaccaattctggaagctcttcagcggcacgacatcctgaccattttcattctccgcaaagctagcgaggaaattaaacgcgttcccaataatgcgctgcgccagcagcttcgtcgagatctgcttctgcgccggagattgcgaaaccaacgccatagacgttctacccgatgggcgctccgattccagggaggcaagctgcggcgcgatattctgcgcttcttcgatcgaaatgcccagtgtcatgacgcccgttacagcagtgtcctcgtcgagcatgtcatcttcttcctcggcttccgagcggcggggagcacgaccttgtggacgcacggtgaagatgcctgagggcttttcgtttgccaatgcgcccacgaagcggaagtcggagggttcgccggtggtcgggtctgggagttgggcgtagattgcggcgccggtgtttggtgggagggttgctcctggtagcataaagacaactatgtcgctgagagatgcactgattgggattgtgaaggcaaatttggttgcttgcccgttcaaatggctgtctactgcaatgatgtctgttagacacgggcggcctgggaccacgacggagaacatgatgtgtggtggtagggtttggacgagctggaggcagcttgagtagctggtaaagcggaaattggcaaggtgaactgcgatcaatattacttccgttcttgaagcttctttaagcttctcgatgatgaaatgacataagaggggctgcccttatcggccggtcgataagggtttggcttggctaaacaaaggtctggttctcagtatatcgaccttcgacttttactttgccatcgggttcagcttctgtctttagaagtcattatgggcaaatccaatttagacctggtcggcgaatgcgataagtaaagctgtcccaactcggtttctctcaattcgcgttttctcttacaccccaccccgcagcttcccctactacgaggatgatcgcgacgtctacacggagaacctgaagaactatcatgcattcaaagtctccggatacgactgtacactcggttatattctcaatgcagtcgttgagaaatttccctggtcggaaaagagctgggccattgactcgactgcgcagaccgtgacgctagtgacaccggagggagccaccccggcacaccggagcaagctcgtcgcagcagacatagccgaagccgtgaaacaaaaaaagttcgaagtgctgcaaggctggcgcaacgagacctacgcagtctacggcccgggcggagaattcctactcgagatggagcgcgctgcgaccccactcttcggcatcgtatcctacggcgcccatcttacgggctacgttcaggatgaatccggtatcaagatctgggtcccacgccgcgcaaagaacaagcagacctacccaagcctccttgataacaccgtcgccggcggtatgtgcaccggcgagacgccgtttgagtgtatagtccgcgaagctatggaagaggcatccttgcccgagtcggtggtgcgcgctgcgactgtctccgtgggctgtgttacgtactcacatgtacgggatgtacgagcgggcggcgagacgggcctcattcagcctgagattgaatatgtatacgagctcaggcttgaccctgaaactaccccgaaacctggggataatgaggtcgaggaattcaagttgttgtcgattccggaggtgcaggcggctttggcgcgcggcgagttcaagcccaattgtgctaatatcatgattgatttctttgtgaggcatgggctgctgacgccagagaatgagccggatttcttgcagattgttgctagattgcatcgtcgcttagaatacccgactgcttcgcattgcgcaaggtagattatttgtttgattgcttgagacatgtgtcagataaggcgaactaagatatatcaaatcaatttcaatcgtgtgggttccttccgcatttgcacagccaaggcagttatttgcaagactatgaaatgattcgatagaagcatggtcacaaccgcactgacatcgactgttgtaagacgaagaagatgaaaatgagccgccaaagtcagatctgttgggtttttgagtcctgatcgcaaagccaggaaagggataggcactgtgcggctgccagaaattacagctctatgcagactcagcccgccaggagacgcattttcattatcgaacggtcaatgttcatctcgtcgatcccatgaaaatcatgattgttatgataatctattggtattcccaaatcaaaatgcaaagaacgcctgcgctgcaccccataagaacgatatgaacatcggtccggcttaaatacaccgacttttcccccattcgggctttgcctcaagatcaatccaagatccatctcatcctatgccaaggtcgtaagcaaaaaaagagagttccaacaatcgtaagcttatttcttaagcagcaagtacacgtgatcgattctcaacggagcaagctttttgtaaggtccttccaggtagagcagaagacctccaaaggacacaaagacagccctagaaatgtagacgttagtttccgcaagagccaacacaccagtaacgaaactcacatggtatccttagtggcaccctcctcgaagcggtacaccttgccgtggcaaacataatcgtagtcatccgctagggtctgatcacccatgctgacctccctccagctggcgcgggtgtcctccttgccgtcaagagagagagtcgaggccagagcgagggacagcgactcgccgaccgcgcatgggtacaactcagtgttcacatccagggtaaaggtgagggaagcatcgttcgagttgcaggtaagacgggagacgcggtcatacttctgggcgttgatcgaggtgatcgtgaaggtgtcttcgaagaggagcgggtcggacatgatgaaggttgcgaccgctgtgttttcggtctatggatggggtttttggtagagcgggttatgcgcagattatcgcacacaaattatcgtaggttcaaaaggccacaatggctagttggtggtccaagagtggtgaagagaagagttggagtcggagatggagaggttgatcggagaattgaagctttttttttctgccgccatttggtcccgccgataacgatttcgttggtttgacatcagctcgttatagctctactagatttcttccctagattgaacttatccgccatgtcctttcgcaagcgaaacataagtctttctcctggagttgaccgcaacgctgttcccaatgctactgcacaccccgctgcgccagttagcacgccaggcattcgcccctcccccgatgatggacggccaacaacatcgacagggactcgctctctagataatcttcttgcaggccatgcagggcttccaatggggaaaattttgttggttgaagaaaacggaactacggattttgcgggcgcattgctgcgttactatgcggctgagggcgtaatccaagagcagaaggttcatgtgattggagtgccagaacaatggggccgaagcttgcctggtctgatcggctcggtggagtccctggacgagaagagatccgacaggcgcaaggatgatcgtatgaaaattgcatggcgatacgagcgattgggcgagtttggagcagtcgctggttcgcgggatggtgagtattggaacaaaacattgcttctagcttcaatatgctgatcaatatagcccctaataatcacggggaacaagatgcagcagcaaaagaagcacccgctttctgtcatgccttcgatctcacgaaacgtctcacccatccgtctatcacaaacatgtccttcatcccacttatgccctcaagagagtcaccattcctcgctatccttaaacgactccagaccgaaatcacgtccagcgccaatacaatccaccgtatcgtcattccttctctgctcaaccccacaatttacccgccgaacgcctgccaacccgaacatgtactccagttcttccacgccctaaaggcgctgatgagtgcgcacggcacccgcgtgaccgcaatgatcaccatgcctctgtctctctacccccgctcatccgggctggttcgctggatcgaactactcagcgatggcgtcattgagctctgtcccttcccgcactctgcggatgccatggctacctcgggagcggcgacctcacaagaagagccaccgcagggtatgcttaagacacatcgtcttccagtattgcatgagcgtgggggtggaagtgaccagaatgttggacaggattgggcgtttattctgagccgccggcgattcgagattaaaccgttcagtctgccaccggcggaaggagacacagaagcgcaagatgcgtcggctccaggcggaatgcccaagaaatctgatctcgaattctgagactctttatgattggtgtgattccctagactcaatcgtcctcctcgaagcgtcgttgggtccctggttctgctagcatatcgtccatctcgatctgctcggacatagcaggaccagagttggccattgtgcggagatagctcgctccatatccgtccaatactggtcgcacggaacggaggcgattccccaagcaggatgaagctgcaagccatgctgttcgtgttagtaatgcgatcgggagtaagaaaggatgctgcgcgatactgaccaacaaagagtatcaggggtgcaaagaataccaggaatatcagcagtaaaaaacccatgatgccttagtatagaacaaaatactcaacgaatgccaatgaagatgatgataaacacgacagcgatgctcagcagttcgcttgccaagatgactattcctaaagtggactagtgtgtaaactgggcttttccttttctttttttttttgggcgttcgtttcttctctccttcaatcaaccctggctttgctggtcaaacccaaagacaactccgggagtttgatcatgttctcgacactttgttaattctctaatggtaagcttcatcctcgtctctcccacacccccaactcgcatgattatttaactacaatctgtcaatcccctgaagctctttgatacgtcactgagtgcttgctgagaaacgtactggaaaatgaatcgcgataccccaatttaccttgctggcaacctgtatctttacatattggacaagcgctaactgtccttgccacagaatcattgaaaatttttccacaaatctcaaatcagaaagaaaaaaatatggatttccaaccagaccttcctatcccgatctcctatgtatccggtagatacctgttgttctcaattgacgccgtgacatacctgcgacgtgagcatcacatatgcggtgtgctcattgggacgctgcctcagatccctcagcagaatgtcttcctgggtctccctctgcagctgatgccagaagaggcacggctcttagtggataagggtgtagcttgcatcgtagacgaagccaaggcacacgacggcatgaacaccctcttagaagaggatcgcagacggtacctccgcgacctcgaatctcaaggccagcatatctcgcgcatccaattggatcgcaaagagcgcaaccgggagcagacattgaaaaaattagaagaaaagaaagcaaaggcgaaggctaaagccagtgctgctgccgcccagacacctacggttcctgaggtcacttccaccccgtcgccgaagaacgctgctatcgttgacctcttcaacgcagaggatcgcccatcgtctccatcgaccgcctcgacgagcacacttcctcagagcgcaacggtcattaccccggcaacatcttacccgccccttctcacgcctccaccatcgagccatcttccagcacccgcggtgccaccctcctatcctctcttcgcccacctccactccaaaggatactttctctcccccggcctgcgcttcgggtgccagtacacggcttacccgggtgatccgttgcgcttccactcgcacttcctcgtggtgtcctacgactgggaccaacatattgatctgatggatctcgttgtcggcggcagattgggcactggtgtgaagaagggcttcttgatcggcggagcacagaaaggaatcgatgaggtggattcggaggctgatcgtgtgggtactgtgcgggctttcagtcttgaatgggctggaatgtgagggatgaaggacgtgaagggtttcatacccttcatttgtttttatttcccatctaccaggcttgtgggtttggtttttccttgcaaggattccatggctcatgcgccacgctgccgggtcgtccttgcctgtccccgggtacctggaaccaggtgcccgaatttctactgtacctggtctcattgagcccagggaagaaatacgtctattggcgatttggaccatcaccgagcataaagatacagatggtatcctcactccaaaggaggtctaccatgactccgccttctagcgactcaggtcggaggcttggaaaggcaaacagtacgtggttaagaagggtcgtcaagtctctggtcaaaccatacgttgcccgactcaaattagcatgtcatatgatcacgatcacaaaaaaatgttcatcgaatgacgtctacactttacagtgattttctggtaaatctgtagtatcatgtcacagttatgaatgatatgcttcgcctgttgaagacaactagccaacccatcggggataaagggtattccaccatgaccaaaatcattccaattgaccgtcttttcgggtcacttcatagattcgagctgaaacctcgtgttcggtgctctttcctttgtctgaattatgtatgcctttccgcgtttgggtgccacattgcgcactgtaatatcatgcagtagacatgatgaaagaagaacgagtctaacttcatagaacaccggcatgcctcctcagattatgactgtgaagctcgaatctcaaagactctcagcagtatcagcttttatggcaggagcgcacctgcgccgctcgagtccgcttcacagctaagcagtcaattctgtcggtagtaaattgggaagaaccgtagaatggccaccgtctcaaatgtaatcgatgttcctccacttgaatttcttattggctctgtccacaggacgattctcgaactggtttccatgcagctcgaaaaccaacggcataggagcttttacatcagactgagtctgctgatccttcgcgccctcggacggcgttggcacaggcactgtgaaccggaagatagtgtgctccttcggtatagctgtagaaacaaaacaaagtcagcatgatcccagtatcgcacctcccactccaaaaatcaaactcactcttcatctcgtccttttcggtgacaatgacgaacgtaaacttcgtatcccgcaccacaatccccttagcaccaaccctcccagtacatcgactcctgacaacctcgaccgcagccccatggtaatccgcactgacaagcttgcttccatgagacgccggcgaaacatggccatgtggtccagccttcacatccaggatctcctgcatatacccgacccacagctcatgtaggcccttgaagatggcgtatttgcattcttccttgggtaggttgtacagtcctgacttgcgcttttcgcgcgctgacagcggttgtggcttctggtgtcggagaaagtattctttcttgcgtagacgctcgagacgacgccgggagcggttatcggatgctgagggggaggttgcgcggaggaagagtggtttctgtttgatgcgctcggtgaattgttgcgttgcgctgtctggggagtgggcgcgtgagagaagggtgtgcgcgatgtgggtcttgggggctggggaagaagccattttgtgttatcttggatgtgtggctccaggggatgcgaaggtgtggttgttggaggttggagaaaaattatttgatgtcacacaccgataagataacgcaggtcatgtatagttcgaaggtatggaaggtataaacaaccactttattcacattattagaatgattcaagtctattttctataagattatcctcggatattggaatatttcagtgattaggtttcggacgtccctcggctcattgatgcttccccgcataaatcatctttgaggtgatatatatctcacgcattaaaatgacacaatacctgcaacaacctattgagataattattgtctaatattgactccttcaaatctgcttacatcaacatgcagtctcagatcgatcaaaaggacatccccagcaacttcccggggattccagccttcccagatgacgtctctacagcaccccttcttcgactatcgtcgggaaagctgttagcaggtgaccatactgagcaagagagactgtttcaagcatctacagacattgggttcttttatctcgatttatcagactcaaagagaggcttatcactcctcggcgatgcagacaatctgttccaagttggcaagagactatttgagctgagtctcgaggagaaaaaacagtatgatttcagcgcacagaattcttactttggttacaaagcgcagggagctatggtggttgacaagcaggggaatccggaccggaacgagttctacaatgtacgtcagcaccgaacacacccacctggacgttcacggtagctgacacaactatccataggtttccaaagacgatattttgggagtcagtgatccgctacccgctccagagaccctgcataaaagccgagctcgattggaatcattcatgcaaggctcacatgcaatcgtaaccctaattctggacatcctgaacgataaacttgccctaccaaagaacacactatccaatatgcaccgactgcgaactgtaagcggtgaccaggtccgatttatcaaagcccctccacagccattagacgacagacgtaccgcgctaggccagcataccgactttggaagcgtgacggtgcttttcaaccgactgggaggactacaagtgctaccgcccggtgccgatgccgaatgggtttatgtcagaccgcttcctggtcatgctattgtcaacctcggggatgcaatggtcaagtttacgaatgggctgtttcggtctaacattcaccgggtcgtggcgccaccggggctccaggctgagtcgacgcggtacagtctcgtgtactttgcacgtcccgaggatagtgtgatgttgcgtcggttggaggaatctgatcggattcctgttatggaggatggtcagactgaagaggtgatcaatagcaaggactggattattcggcgggctctgggtcgtcgggtggaccgtgttgatgatcttgactatgagaagtctgcagggacggagcagctgagtcggaggatcaaggcttagcattgttctaggttgttttgagaatagtgtgaagcttgaaatagattacgctttgcaagtaatacgtcaatctcggcacttgaaaaaaggggatagccatgtgatgtatagccatgggagagagccagtctaatcattcgatggtcttacaactatacgaaaacggcgaggcctatgacttcgccctcacgttttctcaatcgggaaggtacactatcgtgagtattgtttccccttgaaaatatgtaacacccctgaaattcatcaatcgtacccgtggacgtcaatatatattaccgataaaaaaaagcttaaacgataggtctgaccaggggcaaagccgaatccaccaagcccaagagatactacggagcatactacactactttaggaaggagattctactctaaatcagccttctgagctatgaagacaaagtttaagtagattaaggaaaatatacccttcgaacgggcggttagaatctcaccaagacttgacagctccgattcttgaatccgacactttggtaaagataatccagttcggtggggagaatctagattccgaaaacccttcgtgtctcagcgatacgtgcattggtagaaacaaaagcgtatggagtattccgtatccctcttcgatatcagctgatgtgcaatgcgacacattataccccgtatattattctagaatacgatagttatacgatgtactccgtaccccgtagtgcaatccaacatgggcattgacgtgtcaggatctagatgtagtaaatgatctaaccccattgaattggctacatattgacataaggctggcactcggcaaacctgcactctccgacatgacagcctgttctcatatctgtcgatcacaggacctcacatttaatcgctcatatacgaagtacccggaacagcagtgatgcagtgacagcgggtcaatatttttttttgcctcgcgtctcgaccagctggcgctttttcagctacggagtagagcacagaagaccaaaatagcttcttgattgagttagttgaccgttaagatggatccccggccacactacgaatcacattgtgagcgaaaaaaagggcccccgctcaatttccggcgctctggacctgggttgtccacccttactccgaaccgcccactttagttaccccctgacttgttagctttgtcctctgtgcatattaggtactccgtacttttgactagaccctcagtacggagtaaagtacggagtacggagtagacggtgtccagacctcgggatttgataaaataaacgacccaacaatctggatattctgcaataatgcgttatgacagcgggtgacccttccgtctccgggctttcgggtttatgccctgtcgaatccttccctgcagtagtctacatatgttgtactcggctactggtaattacaaacgagggatctctagaactagacaggcataggtaagataggtgacaggggtatggtacttttgttaaggaaaaagcaaaaacatattgtatagatcttgaaccgagccatttaaagatgtctgaatgagcaagcttctccgtgtccttaaacgacatcaattaaaacacgatccaccaacattcctcgagaccacaacaggaaatccaccgaactcaaagccccagaaatcgggagagaaagggctatgggtgacttctccgcgccaataactaatgccctatacgccgtcgtcttcgacccaccgcacggagtactccgtacattattacggcctgactccgttctaaattattgatattttacaaccatacatcgcacggagtaccagctatgtggtaatctccgtcaaagctatgcaccctcaactggatccattgtttcaatataaaaataataaaaaggctcggaccgttcgaacggaaccacacgggctgtgttgcccatctgcccatctacccaccctgcccaagtccccaaatcttactgtaccgaggtttcatggtacgatgtatgttgtcctcggccgaaagcgcccttccatctgaggtgcgtctacggaagagttccggtttgtgctcagcttctgtggcgtcgtggcacccacatcatttgacaagaccccgtaaagatcggggaaatatgcctctagaatggatttggaatcatccaaatgggcgccagataaacggtagaaggcagaaagacacgatgtacgatgtacgatgtactaaacgaggcaattacacatgcatatccccactgtgtggcatgacgtaggaaattactaatgtggaccagtccggtgaattaggaataaacgccgttgggagatgcgggtcggttggtgcagcggtcctctttgggggctttctgtacttaagctattgcgtctggctatccgaggaaatggaaactgggtctgtagtctggtttagtccctgttggggattcccgccgagtttcatgttccgacatgcgcaaatcaagccatacgtttatatgcttacaacgtactccgtagtggatgatggtgtgttgtatacgatatgcacgtccgcccccggccgtcatggaaatgtacacatcatcgggattcgtacgggtgcgcacgcgcaggcatgtgtagtagaacgaggcgttgggaattccctggagctgatctcgattggagatatagtcggtttgaatgtatagaagttaatgccatactatatatgtatgttatatggcatataaaaataagcatgctatcgggatgaatcgagttgaaagcagtacgaataacgcaagagaaaccagtggcagatatcataaaggattgtaatggtcggttgtaaagagaaatcgagtagacagcgtcgtatgttccaagctcaagctgctgattcagcaacgtctggtgttcgttcaagcgccatagctgctagcttctcttcaagacttttgagaacctccgggcttgtttctggtttcacccttttaggtctgaaagaaagaaattgaatgttagcaagaaaatcctataccacatgttgtagggttgagacacgtacggaattcgtatagtttcatcacacttcgcctgaccacaattcaaacatgtttttgcattaccctggaaccaagtctcacaaacatgacactgataatggactctgcgacgaggcttcttgaacgtgcgctcgggtctaggcttgggcggatcagcatcgcccggatatccatcgggatatttatcgagtttggccgggtctcgcgggcatatcttgcagcgcacatggctgcaactcgggcattccttggtgccgggggtaaagagcgaggcgcagaggtgacagttccgacggacccgctggcgcaccggccgacggacgaaatccggaccgccggtgggcgacggcatcttgagcgaaatttcccgggtggtgctgagcttgaggtgcgtggtcctggggaacagatggggtgaatgggcgtatgtctccgggttcttggacttgcgggttgtcggctcgctatccttgctatccttgttgcgggcggatgggtgtcgggggcactttgtgcagcgggtgtgctggcagttgacgcatactttctctgcgccgaaggtggtttcgcagcggtggcaggtacggcgcactcgcatgcggattggcttcgttacacgggttagctggaggtcggggggtgcgttccagtcgctggtgtcgacggtcaggccatatttggcgaagaggctgcgcgccttttcctgttgagttctgctgtagctggtgaacatgaccggtcctgatgggctgggctcttgggctggtgccggtgccggtgctggtgttgctgctggtactgatgccggtgccggtgatgttgcctccggtgcactatatttagtcaagactagtcagcatagtgttgaagtagaataatgtcgtatatcgtacgtggtttcggcttgagtggctaccccaggagtgatagattgtcgtttggacattgaccgaggacggaggacggtcttcatacgcttaaggtatttcgaaaagccctcgggcttgtcttcagggcggtcatgttgagacatggttcaattgaagaaatggtgatatccagagtgtgggaactcattccatacgaaatatgtccagtgtgaaggatgtcagagtggactgatggtaagatccaaaagttggcagggaaaagtaggggcaacccaattattatagagaaggaatcaggaatcagactataatacaagagtattgtataacaattgtataaaaaaaggcccaaagctcagacgtggggattccgatactgtggttctgtggattcggatggtttgggatgctattgaatattcgatgttttattttatttcacttcctctgcttgaaaatgcatttaaaggctttattttatattttattgggtttttcttcgggttttcataggtacaaaggaggagtactatttctccggtcacaattggcagatacttaggcgaaggtgtttctccatactaaccactatagggaggtaccgaggaccaagtaccgatgaccaggtaagccctggtaactccgacgtctcctatttagtctctgatgtgcatccccactcttcctcctccaacccggtgccacttcgacgagaaaaggctttggtctcgaaactctgtggcttcaggagattatctccataagtcatatccgagaatagcgtgccatttcgctggtcttccggcacatcagacatggggccccctgtctcttggcacgccattggttcctctgctttcccgtcttggactggcctatcttcacactggttgacgtttatgtttcgtcaggctccgtacaaaagtacgtactccgtacaaagtacactcctgtcgccttccacggcggtcaaccgatggcgtggcatacaatagtattttggagccaaagggtgggccgggggaccgggaaggagtggtatctgtgctccagctggcctccctacggcagcacccgccatcccggctgcctttccagaaacagctaacttgctggtctatcagtggaagcggatcggggaagaaatagttgaggggcacacaggtgatgagcgtgccttcaatctcttcgttattgcggtcgatcaggaggtttgcgagaattgaattcctttcccttacaacgggaattgaactgccggggaggtgccgagcggatagagttttctctacacggtctttgtgtactttgtatagtaattgtacgatgtagttacatcgtacaacatacaacaatgcattgttactggttggagataaatactccgcacctagatactcggtatatgtaacccattgttctattgatctacaggtagtgctctttatagtgctgactggattattggtttctgggactgtgaagaagtctatgcagaatccagaagcccatgcagaatctctctagcatcgaagggtggcgaaagaaagaacctttgacacacgggcatatctccgacgattggatcagaagaggccatgcatgatgcatgacacggggatcccaaagggcaaagtaaaagtataaatacgagcagttcgtcgatttacgacgcactccgcgatgaaatccaatagcgatcaaataaaaaggaaaagtgctagatatgagggtatgcacgacgtcttcaaatgtaactcaactgttgatcacccctttttggaattttgaggcgattgtcctcagccatgtcatttttgaataccgcaatgaaaattattctacaacccaaggtgggaaacacgagattatactacaatatttttcctacaaaattagtagagccagccccctgggaaataaaagggcaaatgattaaggaaataatttcgcttagtgggcttgagggacgggtgagagtggaggtcggatggtcccagtgccctggtgctgtacggagtatagccgtaaagtacgtactggctaatcttccaagttggataagatattgatgctaatattacttgttatgtatgtagtctggatgccaattgaatagatacttggcaagactctacggtcgtataggatacttcttgtacttgtttatcccggtttctgcatggcctgtcccatgagtacggaagtatagacctgcacagttggcccgcatatgctgtgtgctgtatgctgtatagtataaactgtagcccagaatattagtctcatctgacacaagagcatacaagagtactccacactcaggtatgttaatgatgctctacaactttacattgggcctgtattcttctggcctatctggattctggataccttgccgccgccccccccccccccccccnnnnnnnnnnnnnnnnnnnnnnnnnnnnnnnnnnnnnnnnnnnnnnnnnnnnnnnnnnnnnnnnnnnnnnnnnnnnnnnnnnnnnnnnnnnnnnnnnnnnnnnnnnnnnnnnnnnnnnnnnnnnnnnnnnnnnnnnnnnnnnnnnnnnnttgatacccttcccccccccccccccccccccttcgcgtactgctacatagtacctacatatcactgttccaaatattgtgcattctttttcaaagtctttttagatgtcttactgggccccgagggaaacgcggatgacacgcccgcgttgccaccgccattccatttgccaaatcattgcggtcttttgtactatccttttactactggattgcgtgaactatatatgtatcgatatgaagatcactatatggcgctgaaattatcggagttgaagacaatagaagcaatgtatctgcaaacatcgtaaaatatcttgattttttcacgtgtagtagaccacatctcgacaagatatgaactcctagatcatacgagctgcacatacaacatacagcaaatccaccgaccaaattctagctaaacaagaaaagcagtttagtgaacagtggagagcaagcacatctcgtagtgggcgatcacatttggagggggaccaatcaaccacagccgtttatattgcatgtccacttcaatcggcatgttgcaagaaaatagggacaaaccgccaattgtatcaatcaaaagacccagaatccttttcaacggccacacacggcgggaccagcggagtcatacgagcgtatgaactagacagtcatcggctcctaaatctggtgagatcgaaaggcttttgcgctggatagctgggttgagtccctagtgagcactaggtcagccgggctttttatccgtggctggcggtgatcgatggcttagctggagaggggcagagccagctcccctgggcaggaggactgactattcgtgaatggatagtaatgacgaccaaaaccattacaagcgttcttttatcaagccataggccgtacagcgtcaattgacatataacatctgccggctgagccagataagaatcggcatgaccgaatgacaggccttggccattctaggaaacgcaacatagctatctgatatttgagagttcataactcgtgagatctaccactagcttggttatacgaactgtaccttgaaaatcatccggctgatagatcacaaacctcgttcttgggactatgcccctacatgatcgacgcgagcttgaaatcccggcaatcaggttggtctagcagccaattgcatatcagatttgaattccagaagtgtgtgcatttacaagccaataggatacagccaatccgcaaaaaaaccaaaaagcaaaacgccctttatacaaaacccacgccttgggtatatgctcaatccaccgaaggacatgctctccaatcaaaagacgatttgactagccgatgcggcttaatccgacccggtcagcttggacttgatgttgatgatatcttcatcggcctccacctcaatcactcggttgacttgggcactgctgcgcatcagctccactgcatttgcatacgacatgcgttgcatcgggttgcagttctcagggagccagtagaggagaacgtaagggaccgagggacggccgtctctctatatctcattagtacgtgaggcctgcattattgatggacgacttacggtagtcattgggtggctgaggagaatgaaccgcggcgaggattcgggaagatcatcggccagatcttccatcttggagtagacttcattgtcttgcggccggatttcttgagtctttgtatcaatcatatctatttgcgtgatacgtcagcttcggacgcaggcaatgtatggttatggctggcactatctacgtgctatatagcccgcctggtctcgaaatgtatggcaggtgtgggaaagcgcagagttaggggcccgtacagatgatagcttgcgcatccttggctctcgatgtgcccagacgaaacttgcgcagcttctccttagtctcgggcgagaacgaatatagtcgtgaatcagactactaaagttagcatctgatgggggaaactttcgcctggccgacctggtgccctggtgcggggagacatctcaccattttggacgtcaactgtgggacacgcagagaagtcaagtaaacgaaagttctcagcctagcgctaataatgcactgtataaagatgataccggtatgtccgacctgaaaaaggagaagactgtaggaatgtgaggcgagacgatggaaatgcgggcggagtttccctgttcccccacctcaatccctccacgctttgaacaatctagacattactcctccacctatatcttcatgctcaaccgattgaatctactgacgcggcacttatcacgcccattcagtccctctcgtcctataagcccctccttctcggccccttccctggccgctcgctcaggtctatccgcgatgacatcagccgtgcacccgaagctcatccacacggcagcatgcctcattatcggcgatgaggttctcggcggaaaggtagtttgagatatcgataggctccccgtgaacagaacatatattctgacattatcgacccttagaccgttgacaccaactcggcattcctagccaagttctgcttctcgctcggcatcgacctgaagcgaatcgaggttatccccgatgatgaagatgacatagtcgaagctgtacgacgcatgagctcccgctatgacttcgtcgtgaccagcggcggaattgggcccacgtgtgtccaaccccgtccctagtttccccgagcgatgccgacagcacgcaagcaacgcagcgcttcatacaaagcctagctaacacatgtcccccatttacagacacgacgacatcacatactcttcaatcgccaaggcattcgacctgaagctggaattgcaccaggcggccttcgagcgcatgaagcgcctctccaagccccaccccttgcaacagaacttcgactgggagacaccatcgccaggactgaccgccaagctgcgcatggtcgagctgcccttcgacccgaagatccccgctgagtcacaggccgtgttcgtcgccgatgacctgtgggtgccgatcgcggtggtgaacggcaacgtgcacatcctgcccggcgtgccgcggctcttcgagcgcctgctgcttagcttgaagccctctcttattccccgtttgaccgacccggaaggcaaggggacgttccgcttgttgttcagcacgccgttgcctgagagtgcggtcgcgccatatctgactgagttggcggctagggttaaggctcggggggtcaaggttggcagctatccgcgttggggtaaaaagcgcaatactgttactttggtcggggcggataaggcttacatggattccttggccagtgaggttgcggagaatgtgcagggtacgctggttgccacggaagatgagctggattgtccgtccgacgaggaccgtgtttacagtcagtagattatttattacatagttgtctagattgactgcgacttgaaatacatgcagcacatagagcctaccaaatatatattagtgtcaaacatggctatcttgaccaggttagattatcaaccttgatatatcaaagcagtagccgtaggaaccagatcataaattgcgatcgagaataggcggtatatcatacgcagagcattcgagagtagatagaacgatctagatactagacaacctcaaaaacaaaggtacaggccgcaatgatggaagcaaggcatccaccttgctatgaaagaacatatattgacagccgtgtcgcctcacgagagcgacaaggataatgataataagaggcgatagataacaaacaccagggatctttcgcaaagacttcgacagtaaaaagacaataaatagggattaaaacatcgcaatcggacaacaaaaggggaatcaaaaatgtttcgtgagacgaggttgggcgtcaaggtcggcagtcatcaagaatgcgagtccattgaagaacccacaaacatccgtaacacaaacgacaatgccacttcttctttggtaatttttttctggtttggtttgttttctgttcgaggttgcaagctttcgttttgcagtctctgtattgtttcccatttagatctgagtggcgggttattgcagattaaggccatccaaaggtaaacaagatatccaacttttccaagggcaggtgggtgttcaccacatgctcggacatataaatccacccccgtaactcttcccgacattgtgtgctgcgtatttcggattcgggggttgtttcgagatctgccggcatcgcaacgattcggatcattttggtaggttggtgttttttttacatgatgacgcaactcgcgcagcaaccagcgctctcgcctggctcggccacgtccatcttgccctcgggtgcgcgggcgccgaacgcgccggagccggaggggtacgaggacatttccttgttgtagcgacggatctcgcggacgaggtcgtagaaggcgttctcgacgttgatacgggacttggcggaggtttcgatgaacttgcagccgaactgacgggcgagcgcttcgccctctgtacgcggtgaatgttagtttcggggttcggatttaggtttccagagagttcaagcggagagttcagggtaatggaaacatacctgcctcggagaccacacgctccttttccaaatcacacttgttggcaacaacaatgatggggaagtaatccttgtccttgacgcgcaggatttgctgttggaaggtcatgatttcttcgaaggattggcgtgatgtaatggagtagatgagcaggaatccctcgccggttcgcatgtattgttctcgcatagccgagtattcctcctggcctgctgtatccaggacatccaacaaagcgacttcatcatcgatcacacactgcttgcggtaggaatctgtaggcggaagaaggttccgaattagccatgctgttcaaccagggcccggcaccgctggggaaaagcgataggacccgcgcggttgataaaatgggttgaggggggacgtcgaagtgctcaccttcaattgttggatcgtactcgtccacgaagtggctctggatcagctggatggtcaaacaggacttgccgacaccaccaccgccgacgaccaccagcttgtattctcttaggaactgttggagacggggttagccatttggaatgaccaaaacaagtcggatccggcacattggatcaccatctcacctttgaagccattatgagttagtctcagggaagatgaaacagaaaagagatattaagccgatcagaaaggaatcggacaatttaaagcgaaatccacctgggtcgtttaagaaaaaaacaaaaggagaattagggggagagttcggaggttggaactggcgggaagaaataaatggagaaaaccagcgagcttcgaagatttggcgaattcgttcaaatccgtctggggtaaacaaaaggatttaaaatcaaacacaaagagatcttgttcccttttttttttctagagaagacagaatcgaaagaagaagggaaagaaggggcgaagggaaattcaggagatagtggggaggaaaaggtgattgggcgaggaaaaggggacatgcgcgccattgaatgatagattgcttttatatttactattgttcctaccgtttattttggttcttcagctcttcgattcatctatataacacaagtagcactgtgggcgccttatctccaatttcgccttcctccttcctccttcctccttcattccgatatacgttggtacactaaattgtatctcggccagggcattgattggcttaagccacggacccattgaggaacgtgccattctaatatagagcggagatattgctccttttacttgcatctccatcaagtccgccattaccggcctctgttttgtctactccgtgctggttccaacacatctccaacataccatcgccagatcaggtcagttcctccagagtggatctgccgtcccgagatgggtcctctttggcgcctttggggattggcctacaatgtccaccctctactccatattggctggtgagagataacacgaagccatcatccagatagcaattcaaggttgggatagttgggcaccaaacagtctggatggtttgctcgacaccgcatattcatcttggctttcttatacgcctggatggcttgcagtagacgcccgccttgcataattgcatcatcccgccgcaacacagtcagctctgtcatttttgatgattggatccatccaaaaaattgtgattctcgtcgcggttccacttttagaacccccatcgtacgaatcatcggaacgtttgatgccgacaactgggttttccccgatcgccgtatgccttacgaagatccaagtcacgcccgttttctgacagatgacacagcggcatattggacgtccacacttcttttcttcggtgttctctgcttataaactgcttagactagcgttgacaggcggaaccccgcgattgaagacttggatctggccccggagtatgtgcagtgtcacatttgggcacctcaagctaggtaatgtctataacaagcttcacctagctatactttgacactctttgactttttaccgatcatagaatccttgaaatgatgtcaaagcgaacgaaaataaaagtaaaaaaaacaattatgcgcttggtccacggttcttccccgggggccatgcccgtcttgacctagacaggactctgttggtgtcttttccacggatgactggaactcaattccttgtcggttcaaatatttgtctcaacgttggcaaagaggcgagatcaacctgggatgtcccgatattactagtcgacattcaaatttcaatatcccattccatacattatcttagaaggtgagatttgataatccacaaggctgcattctttgattcgcaatgtgggctgatcctgatatgacccgtcaaacggacggtctgtgatggatcatggctcgggtgatcatgcaactgtcagcatccggaagtagtgcgactgtgtttcgaagcagcgcttatgaaggactaccatgggacaattacgagaaggcgaaaatgagccgcacaaatcgatatagaaaatgcaattggtagacattatccagtatctactgacaaatctacttgccaagtcacacagacgtgatacatacctagaaccaacacaacctaggcttgcatagtgcggagcgatcatgcttgtcatgccaacggccaaatgcattttgaaatcgagaggcgcaccatccacatagagtgctttatacatatatcaaccagctcaataaatgtatactcgaaattacagctgtcccaggaaataagaaccggacagataccccgggatcacagctaagaaaagaccgaatcacactcgacctaacttgggaccgaaggcatcaccaatcgcactcgacgtgcaacagggcatgggggtacaagttcctgggcacatgagcaataataataaacacaacatgtccaatctgtagatttaagtacctgaccctgaagaaatcaccgtaaaaatctgtctagagaacgagcgcgacccaatccgtgccctacccaacgcccaaggagactaaacaaactgacaacaagccaaacgccgaatatcccaaactccatccaataacctccaatgtctcttgcagatctccaagtcggcggactgtatgtcattctccaagcccatcatgaaccacccgagcccaatgagttctactggggtctatacctccactcagaccccgtgggagggatggcataccacgtcatagacacaggatctggcctgagaccggagcacgagtatactggtagaatattcgacacgccgcttctgacgggactgttccgaatcgccgatatcactcgtcccttgcatccatttgtcgacagggtagtaaggtcctacgacagcagcctcaactgtcccggaagaagcagcaacagcaagttctgggttttgaatgtccttgcgctactgatccagcctacggccaccggatggcttccagtgaattgccataacctgccgatcttggagcaggaaatccgcgattgggggaatcgcatgtcccaagggcgatgtatatatcagagactaaagccgattggatcttcgacgatctgcgggttgccggaatggaagatatagcgtgagttgaccatttctctcggtaatcctagtgcgggggaaacatcgattgacgcaaaggcaatggaatgaatagccgaataccctatctattcaacaggtccaatcatttgactatggtttcttgtttcgggcgctaattgacgggtatattatttcgtgtttatcaaatcaagcgattacttgcatattctacctgtcatttttttggacctaggttattaattccaaagcttaagcatactacattgactcatagtaatctgctctctattaatactacagttacttccataatctcccttggcagctcaagtctcatccaaagtagaaactggtcaggtgcctgtgtgagaagtacctccacacccgtaacagtgtcccacccctggttctgctgtgctgccgtcaatagcggcatcttcctcggcttgtacgacatctcgatacacaaacccagatcttcattcaacgagactgatcctcggtagtcgtatcatcgggtgccagattgaggagcagtggcgtttgcggcctggggggaatatatcctgaaactggaccgggggggggttgcatgaatgtctcgagacagccgaatagaacaagggaactaacttactaaattctagttactggaaatgaatactatagacatggaagatcattagaccaaaagaatcggtttctccaaagattttgcccattaaatgtttggtcatcgtcggcatgctaaaaccgtttgtggggagaagcataattattgtaccgacttgccaaagagtagtcatatggaaaatgaattgatgtatgcaaggatgatatgctagcaatatatcttatgaataacatgcatattgtagtcgcaactctgcttcacaaacttcaattgagctgaagcctctgctgtagcttcttccaagacgcaatacccctctgcgcatgctgatcgggtacatgttgaccctcttcagccatcgttctcgaaaacaactccatcgagatccatcccttgtatcccaatcccgacgtaatagttcttgcaacatcttccacaggcagatatactccgcggtcctcctcgtacatgtaagctctcgcattccgcgaccagttcatccgcgccggctgaccttccacgtagaacggatgacccgggaccagtggcgattgcaacctctctgcatctacaacctgaagataaaagacctttgcaacatcgacctcggccaccatccgctcgagcgactccttcaaatctgaatccgcattggccgtcttgccggttggcgaggtggggtcggcccacaccttccccgcgatgttgaaggtgtcaagacacatgccgaaattaggtcggtcaacgcgcttaaccacatcccagactttctcccaggtgtcgttgaccgtgctccagcagagattctcatacgcatagcgaataacgggagtttcggcggcgcccatatccgccagttgcctcagatcggccactataacatcaatgtcgtccgtaagttgctctgccgggaggaagttggcggggatttggatggtggtggtgtccaagcgtttggcgagctgcagccacagtttcatcttttcaatcagctttgcatgctgctctcggtctttgagtccctcgtagaagaggaacggctgcagcgtgataatctcgagggagtgggcttgacagattgagtggatcttatctgctgcttggagcagttgattggatgttggggtgtcattcttggaaatccctcgtgcgaaataatcgaggtcttcgtagaaaagctctactcctttgaaacccgcttttgaagcttggcccatcttatattcaaaatcatgaagccaaggtcgtcccaaggagacactcataatagcaggttgatagaccatggtgtctctgtatgggaatttgaatttgacaatgagttaagttggtgagatattcctgtggaggatgttgatgctatgtacgcggagtccacgggttgtggggtaagaaggtcttgccgttgtcggttcagatcttcgccgtacgtacggaggaagattctacgattgggtctaatgagatatttctgcatgttgactgttggcatatatgacttgagaagtctcggccctggtgcttttctcctctcaagaaatcatctcttcaccccaagaggaggaagtcgtcgcccgttattggggttcgggtaaatcaacaccgatcacgtgatacgaacggcatcagcttggatgaccatgaaagctcgagaaccaatggcttttatttatttcagagcacatatgcccattcttcgaccttcaagtgttcaagtgtttgcggggcatgtgatcaatgtcgttggtgaaagtccaagtgtgagggaactgcctgcttgctccaccgcaatcacatcggagcactcggaaacacacgactactaagggatatagactttggtcggtgagtaaaaagctggatagggggtaatcctcatacgagatcagttagataaagacctatcaacataatgttaatttgtttctacacctcgactaaaagcaaaactcgatattataaaatgagaaaacgtgccgcgaaaaaataatcccaggcttctttcatgccaaagatgaaacaatcgaaagccaacccaggccagccgatgctgcttcgatcccctgagtatccttttgcgggggatgggtggcgcgagccaacctcgacaactggaccgcgagcaaatgctctctgaaatacatatccaagccaccaaccatgtgaatgctgtgatcaacaccgctccctcccttcttctctccccagcacagcctggggccaacaatttcatcttccatcttgccggtcctacttccacttttagcccacacccgcttcgtctcatacaaagtctcccaggcgatgccaaagctcccaaacatcccgccttccttcttaccctctgccgctgcactcttccaaacgaaattgcgacctccatactcaaatcgtcgcggcgaccaatcctttctctgcatctccccatccggaatctcggtaattgcgcctatatcggggattgtccgtgtggtcatccggaaactgcctcctttagtcttctgcagcttcacactcgtcgccccgatctgaggtaagaattccccggcacgtcggagtaccgtgtcgacgatgggtgcctcgttgctccagacgaattggagggcgtacaagacgtgcgtgttggtcgagtctttgacgaaaaaccaatatgagcgcagacccaggttgaccagctccgaggaatgcgtaatccggtacgtgactgggggcgccgacggagaaagagtcagcgagaagaaggggcgttgcgaggtgtcggtattgaggaatggctggaggtgggctggagctgtgctgatatccgttgcagattgactgggatcgtctccgcggaaagtattaagatccttgcgaatctggcagttgatcagggtcagtgatctagaagaggtgtacggggtcctggactgtgtggtttacctgggtcaacgaccaagtcgttccgtcttcgttttccacctcctccatcgcatccaaaatcgtcggaggcaatattataccatcgaagctgcccttgcgctttaggtcttcgagataggccaggcgctctcgatgaacttggacctgtctctcaaacatttttctgttgattttgaggacatttcctttcttgtatattttgattgctgaatccaaaacagtgatggcatttttgtagacttgtatggcttcatcgtactcgcccttgcgttccaaaatgaagggcaaggcggcgagcttgtagaccttattgttggcatcgatttttcctgtcattgcgttggtcggaaaatagtatattaatttgaaagatgggttctatatctggtagtagtgatcggttgagttagtagacctttgcattcccatggcgctcctttataattgaagacatcggagcttttctttgtagcttatgccaaggtaggaatatgccttgccaaggagcttccgtgtaaaatcgagcctatataggacatgagttcgtgtggcagttgtcgctaacgcttgtactcgaatcagggtgcagcttgggcttcctttgggagaaagaacttggcattttgatgcaaatgatcacctgcagtatcagccatgagtccatgacagtctgtctcacagagccttatgaacttcagttgagatatgcttggctgattcttggagaaaaggatactaactaatcgcttagtattaccctctttgaagcttggcaatggcttagcggggaagcactggctttggggcacatggccgtcaagcaccttgaaacatatggtgactcagccttcaggtccttcgactattttcaaaaagttatgtttgcgaggcttcggccaaatcaaaacagcgcgcattgaatcacgaaggaatgggttgagggatccactgagggagctattattttccatctagggacgtgaccatgataatgtgataaagaacaagagcctctcaaacgtaactggaattcttacgaaatggatcccgaccaaggctttgatgtctttctagcatggtgtattgacacggtccgtaactacaaggaaagagtgctaaaagtcactttcgacactcacgcttgaatagaaacgtatagaacttgaacccattttcaatatcgggtgccatagagataatatactactttcctcactaacagtgccagtgctgcggccaccacctctgttttctccaccaagctcagtgcaaacgttgataatgtgaaaattgaacacaagtaagaaacatccgatgcttaatcttcctgtccaagctgtgacatgtgattatagtgcggggtcaaatctatcatacaagattccgtcagccattcttctctgatcactgacacataaagtgattgctttattgatcaatattcgtgataatagtcctcagaaactatacttcaagatgcagactacagtctttgacaaagcttgtgccatggagcttctagaatttgcgaacccttttcttgaggaaaagggtctttcgtcacactcatgggccaaaatgcctaatcctgcttgctccgctcccctccttcgagtatgggacaaaaactctggcagtcatcccgatcaatcaaatagaatgctggctcgtttgccccgacagcggttgggttcgcgagaaagtcgagaaaagtcactagccacacatgctgcctatcagatatgggagccaacgccattcatatcctttactgcatcagtattaggtctgcaaagattcctgtctaggagaaaggggccacggttcccgcgaacacttacggttatcaatccaaacgttcgcatcgccaacggtctaccgatactcgaaatggaatcagaactaagatattacgaagtgcaggacccatatagaagggcgtattctttctatagagatgaatatctctgtctttgggaggttacgcctgatgaggtcgtagcacactgggactgggatgaccttatagaggacgtccattggtacgaggacaaaatactacctgctttcaaggagcacaacgatcgcttcttacgcagaagtcagattgagacgacttttgatatgtcaacactgcaaagtgctttgcccggcatgttctctttctcagtcaacagagacgaactgtctgggtcagacctggaccgttctcctgaagcagactcatttccaaatgaaaattggagtttctcaagcgaggaggagaattggcaggttgaagatgacacttattgggacacagacgatgaagtggaggagtccaacgcgattgatgattcatttaagatccttgaaggcgactggtgaaaacgatccttgcagaacagggaatggcgaaggttaaagaagggtagattgatgtctaccctggccctaaataaaaccacatggagcaaccctgtgattcaaacacgagatgtcaaaggctcacagtatcaccaaaaatacgactttttcctcgtgtcaatcattatgtttcagacatgcaaggcagcagctgccgtatgaattctaccctacactaaatcatagatattaccgggctcgcttcagtaacttagttaattctatagtatcagaacctttttaagcttcttctccaataacagctgccagaaggcatttgggggtccctgtagtagctatacaccaccattacacgctagtgtattttttaaaaaggaaaaaaaggttgagacagaacttttgaaatggacctccataggtactatgtagtatgtactgtaaaagatccccacaatgctaatgttcctcaggccatcggcttaaattgaaaaggaaaaagaaaaagggtcgggggaattgaggctgagggtcccggctaggcagccaggcagtccagcaagggactagcttggtggaaattggccctggagccccgagtccacttagataggcatatcatgtgttacttggaatatttcggcgctctttttctatctataaagtcctaacgagcgcaatatttttagcctaagagtacagccacaccgtaaccgccaaactacaaagtacaggaattggaaattttcgagtcccggccaggcttgccctgtctggacccttccgagctattttggtggccattaaggggtccaggtggccgcactagcaccgcactagcaccgaagaggaaagaaaatatctcttagtcggctagaataaaaggaaccagccaatgggaaggcttcgtttcagttgtagatttccaagctttccaaggtttccgtctagatgcttactgcgctgaaattgaaatggacttatataactatctccaagtccatcttcttgtctccttttcacgtacaaattccatttctgtcgctcgttgactaccccgacattcgttaattcgtcatttcgttcattcattcattcattcgttattcattcaatacaacatgcgtctccaatctctcgctcttttggccggtgccactacagccctcgctgtccagacaacctctcttttcctccccggattcgacgagcaacgaattgatggcaaggtcattggcactgtatgtgcaatcatcctctctgttgatttagcacaggaagttgactaatatctttccagagcggctccatgaccaaatattatctcaagtgcgctcccaatgttgacgccgacgagtgcggccttcccttcgatggtatgaccgtggcccaaggcccttcaaccgtcagcctggcatacagcacagaggatgtgtaagtaactatctgcaccacttatatatacccccacactcagagctgatcctttcccgaaacagcaccatcagcgagagctgcaagttcgattccataagcgcgacgtgcggcgcaaccgtcgtgaccgatggcagcacctcctcgtggcactcggccatcgcaatcagcgaaatccccggtggcgtgtacatgcccgtgactatcactgcaactggaactgacggctcttccgccaccactggtgctgccgtctccgcttctacggccgcttcgactagcgctgctactatgactacctctgcttctacttctgatagcaccgctgctggaactagcactggaactagcaccggaacgagcactgacagcagtgctgctgccaccagccagactgagactggtaatgctgctatgcctatgattactggaaacgcgcgctgggctgccggtggtgttgctgctgcactggccctcgccgctctctgatcatcgggtcgttttcttggaatgaacttggatgcccaacttcgttaatgcctgtctcgataaatatgtacctttctcatgtataatatgcaatatacgaagcgtgtaatactttgtacttcggtctgatagacctttcaaaacctatattgttggcggtcgaatatgtacttcatattcacgcaacacaaccggaggccttgcaacatgtacaatgagcgccatctaaagcctctatatcttcactctgctttatggagtgtaagttacgacttgcggtgcatgacgccagccgaagcctatagattgtcagaacatgtctataacaagatttaaccgcaaaataagcttacctggtggctggggaagaccagggtatcggcgatcacaacgttctcgcgacgcccagctgcaaagacaatcacctcggcgatgtcatcaccggtcaatggttcgacgcccctgccaattgttaactatattctgtttcagttcccttagcatgacttacttgtagacagcatcagccttagacttgtctccatagaatcgcacaacggagaactcctaatcacgatattagcttcatatcaaaggcgaataatatatgcgatgcccataccgtctcaacttgaccaggatcgatttcaatgatacggattctcgtggcgacgagctcctttctcagagcatcagtgaacgagcggacagccgccttggtggagcagtagatgctaccaccagagtaaggctcgcggccggcgatactgccaatgttgataatatcgccacggccaccctcagagcgcttcttgaagatgggcaggatggcctgggtcatgttaatgagaccagtgacgttggtgtcaaacatgaccttgatatcctcggcagcaatcgaaggtgcctgggcaacacccttgaccaagccactttcaccgtgaatgtcagtatcgaccgtgcatatcaatcagtttagcttggtgtgcatgactcacgcattgttgacaaggacgtcaatctcccggaactcctcgggcagggaggaaacaaagttgctcacttcctctgggttgctgacatccagcttgacgggaagaacctggacaccattgccgacctccttcgtgatctccgccgcgacctccttcaatgtgtcgatgcggcgcgcggtaaggatcaacttcaggttcttgggcgacgtacgggcgaactcctgggcagtgctctttccaatgccagatgaggcaccggtaatgacgatagtcttgccttcgaggcgctttgccattgcggaagccatggtgcgtcggatagaagttcggaaggtggggcttgcgaagagagctggggatgtagaggggcgtgagagtcgttgaaagagtccaattaatctgaagcacgctcgtagacgggtcatggatcgaagtctctatttttcaaggagaaatgaaacgcagaacccaaaataaatagattgatcacgaacgagtgcggggactctggcgtcatattgtgttatgtaatcccagacaacgctcgcccgcgatcggcaagaaggccgatatttcttatctcgagataatcgtgccaagcccccactagttatgggccacgaatcgacgtacgtgggagtaattccacccttgccgaaataggaacctaccgatgactattcccgtatagctgggtagtgaattgggtaattgtgcagggagtaagaagctagcttgggaattgagaaaatcaaagtgttcattttgtgcctatgtatctgctgtatggaatatctatacaaaagatacttaatgcacagtgactcacaaacacagcaaagatgttgtagggcgcttgacacggttttcggaggtcatgttgataatggagtttgtctctgaatgcctcatcatattctttgtactccttagagtgactaagatgggagacaaagccccgtaggacttgttcaaagaaatagttcctctttaaaggaaaatgccctaattgggatggtcatcttgaacatgacaaagggccaagtgcatgatcatggtgattaacgcgagactcgttgtagctggacaaagatcaaatgaatgccattgtctacatttccttggaggacatcgattcatagttctaaagaccaggtactgcccccgatacatctaataaataaccttgatgatacccagcagtgtacagcaatcacagcgtcggctctttcccttgagcccttttttgatcgttttgttcagacagagagagcaagggtcgttccttctatatccagcgcagcaaaaacaccacggtaacctaccacctcttcctagatacaaccttgttgacattctaacatttgcttcatgtgcatatatcctagaatcacgaccacacggctcgattgcaattacttacatgggatattgatgacaacatctatcggatattacaagatatttcatcaggatgccttctccagccagggtttgctatatgactcctctgaacattgtgtcaaaccgtaatggaagcttacatgaatcttcttcaacccagaaagcttcatctgatgagcttcttcgccggtgtgattttgattgggccgaagatgttggggacgctgcgaccaacgataattcacatatgcccatcacaccagaccctcttggttacccattgccaaagccagatatacacaatgagatatatcctactactcgctatcttagatatcccaattataggccatcactcccaactgtctatgaagaagtctgggatgagacattgggctgggtacatggcactcaagatataacctccagctcttctgagagaatattcacagactccgatgatgatactaccgatctttcagcatacgagggatctcccatcaatgacgagttagctcagaacatgttcacagtcaacggtgaaccagacctccacttggctgcacaacagtctatcaacaatatctttggggaccgtcaggcctggatcaatgccgatacagggattcatcacttcaactggatggggctacgagtttacacacgcagctcgacctctccgtctgattcgctagccattatcctcgcaaagccaaaaaagccacagggaggtgccatgtggagagtttactcagttctaaaccgagctacccagtacattgaccccgtacttgtatttttggatcaccaagatgaaagtttgtttgaactccgaggctcagagcttgtacgtgcctccgctggacgtgttttcaaattttattcgcctcatggaatgtggatggaggattcgagcgatacgaatgacgatattacgacagactttggtaatacccggacttacgaagcgacaggtttagccgttggaaatggctttgttgagtcgagtgccattcgctcactgtcacaatggactgagtgccgtgatgaagcctctgaagccgctgagagatcgagtcggtttccccgacggaggacttgggagcggaaaccctcaccactgcgacaatgcgagtctataaaagactcagagtaccctgaggcctcaagctcactggcgttcaagcaggcgaagagaccgcctcgtaagattacaacttgtgtagctggggcaccgcgtgaagaatatttctccttcccgactcctatctttggtcgctatagggcaatcaaaaaagcattccaaaaggtgcagcgggggtggaaatcgatgctcagatcaatcaagcacactctgagctaggtagtagtccctcttctcctcgatcggattagctttgcatctaatttagattgtttggatcttgaactcacatttggcaggtttcactttgctctttgattgccgcctgtttggattgatcagattgagcttactctttggatttgctcaggatcagcttccatttggcaaggatttttgtggattttctattttctccatgtcgatatttcaaatttattgttgagaaaatcaagaaccaaagaaagggccgtgtctcttacgttcaaatgttgtctttctttcatttcctttatctgactatcagcttggttttgggccactttcatatctggatgagtccatcatgccttcgttttagtttcatttgtgcgagatcaagatctatgctgtacatccttatcaaagaatttatgaaggcttccttcaatataaagcagacaagtagaatgcgtacatgttttgaagttctaaatctcatgagcacaagcggctgggtatatatattcttcatggatggctggcaagcaacgttgccggcggtggctgtccaaaggatatctaatggcgaatgatcacgtagtgtctttatgagaaacaaccagagcgcattcggctagatgatgtcggaggagagaaggagaggtgaacatgtaatggcgatcgtactacgttgtatctgtaaagaggaaaacaactggtgtcgattctgctaagttctcatggacagaagggagagagagagaggaagagaaagcggaactatctggtgatctgtacccacatgggtgactgccttccggacacccaacaatatctgatgcaatccggtaggctcaacgcggacttgattcataagtctccattctcacccgctttctgacagaggatctatagaaaggtatgatagactccgctcgcatctttcaagtcttccatccaccttccatgtggcgagtaaaacttaaaccaggcttggattctgaactgcactcgacatggccaaaatttgttgatatagtgctggatggcgtgatttcgaatgtcatgccttgtatggtcccccactcgatgacgctcttgaactccgttcctccgtcgaggcgccaaatcctagggtatctcccggtcctaagcttgatcttctcgtagaacgatttcagcttaacggatgcctcgcccttattggttagggttggtccttcgaggtaacgggtcgcatcgtcgaaggaaaagtagtctgacttgcagacacttcctcgagagtgccgtacctcgtcggcccctcggaagaaaacgaagaagactcctccgacgagtcaagtatctgaccactgtgttgttgtcctttttcctcaagcaccttccgttatctggatttttgctgtacccgaatgcataaatgcaagtgacacctcaggtgttcgtgtataaactggccagtcgagccagatctagtggtgggttgtaccatcctggttgcaaattgccgctcggtacttgaatttgtcgagctagcaccgggagaccgtcacgagctgcagaattcgagctaatcttgacagttggactggcttcaaggacccaagaggtacgaatgagcgctcgaagattgggaagtattgactgttggattaaaataacagtgcgatccctatgcttcttgttgcacacttgcctagggcacaggctgttgctgcgtgcctagatccccccaaacacccagcttctttggctgactctagtacccgattggatgtcaggactcgatagagtgtctggccccgcgagcaggggacgtataggtcattggcgcgaacatccacaacatggtgaagtgcagacttgtgattctcgatttgctcgttgatagtgcgggccaagctcgcaccccccgagaggaaaacctgatcgcgataaatctgcattaggtaggatgcatgtagattatcctatcgattttagccacaattagtctcctagtcccctcacaaaataaataggcagagtggggaagacatactatccgagtgattgtgaaaagccatccaactcctagccaagatgattcctaaagggaaggagccgttgggctttgtgtataaatgaatatatcatgaatggcttctgtagcaatgagaatgcgatataataaacgatcacctaagaaaaagaatatatatggatttataaatgatggtgatatgaaaatagaaagagagccaaggaggcagagagctggctgtcgttatatctaggtcctgacttacgagggccttaggccatcaagcattattctgtggcggagggagagaatgtcacggtctacgattaatcgctatcatgtgcttcatgtttgctcgtttgctcgctcgactactgtttgcattccatagattgtttgttagatagctaagcgagaaggttggttgtttgcaacgtttgcaaagtggtcagctatgtcattccactttgcaacttgcttcttctttgttcatcctacgttttagttgaatgcacttcatagggaccgcactctttcccttcgacgaggacgcaccctgtgatgagggaaaaggcgtggcatccgcaccgaaggaaaaaggtattgttaacttttcaggtgtacgttcctaatcgggtaactactgcatcttacaccccttccgatttactataccgccttcgcgggaaatagcagctaccgatcatgtgatatttttgtgtgtttttgattactaagtttgtccacaagattgccattttcggagcaattgtttttatttttagttagttaaagattttattgaggttttctgccacatatacactcgccttatcatcgattttccaccacttttcactatgtaaaccggaagtgggcagaatatacggcagaaattatggcagaatacattgtcgtgcctaatcgggaaggttgtactgagggttgcatcaacaatcctcatattatactttgttcgagcataaatagtgtactatgtagcagtatatgggcagaaggaaacacctaaaatggttgagtctcctttttctttggtggagagtcctcgggggtcgttgaatcaacgttccccgacattttgggctaaaggatggtgaccgactacacgaggcagtagatcaaattgggtttttgtactccgtatgtacagtagaacggccaagaatgcgacggtcgacaaatcaaaaagtcgaacggccagcaagattggcggtcaaccaattggaaggatggaagcgcactgtgtggagtgcagtgaccgggatgtaagtctcggccggttggaattccgattcgcgaaatgagattccaggatggggcggtgcgatgctagcaccaatgggaggaaataagggattgaagcttgcagtgatgcagaggcttcaagaacgagggcttatgacctgtttgagatggaatcaagaagtctatggatgaaaacgtagatactatggaaagtctcgtgaattgcgtgaggaaagaaaaggaaactacctatgcgctgggactaaagtagttgtcgggagcggagagaggtgacttcgaacagttccttttcaaatgggtgaagaaatatcagagtgcagtgaactgaatcagagtgcgaactcatcacgatatcagctgcgagcaataataacctgtaaacaaaattctattcttcaagtatctagcgccaaactatcatatgatatccaaccatatgaaagcaagccaaaatgaaaccaatcatagaaaggaccgtagtcctaaagtgactgaaatgtcacttgacagtggcagcattccgagaaagaacctcaacctcaaccctccttagtctgacaatgatgaaagagtctcaggtaaaagcacgcgtggggtgaaagctgctcttatcaaatgcaatgccctcttcatgaatccccacatgattccaagggggaaaacgaacatttcgcgggggatgttactaaaagtaaccagaggcttttcgatgaatatgcccatactgccaaacgggagagaaaatactgtattaggaacagtggtaggcacaggccaggtcttcttcatgatggttctcataattccaatggggaaaacgacagagctgtgaatcgtctttgtggtgatccgagccttttgagtattgcccacgatctcaagtgggacagaagagaaagtgaggggtcggcttggtggtgatagctccttggatgatgtcgactcgatcttgagcttggaaggcgtcggcttccaagtgcgtttccgaggagagcgaacgggttccttgctggcagcaactagttgatctcgccaatccaaccactcatatcgagaaataaacggtccaccttcaagaaggccatttgcaacggcgaatcgcccgattgcaaatctttccaattctgactccccagcatcaggaacgatccttcgccgcattgagaaatcatcactcatccaatttccgtggagagaatagtgagtgtaggtgagaccttcgcatgcttcaatcattgcagacccatacatttgcaagataccttcgtcccctctgtccacttttaaaatgacagggtcaatgtactcgattgcacatttcatgatcgagtttacacggagcttatctcttccccgtggtgctttcggtatagcttgcataaaagcaagtgagacccctggtggggtggcagttcgtgtatagactggccagcccagccagttccagtggtggatagtgttatcctcattgcaaatttcagcgcgataattgaactcatcaagttctggttggggactggccagctgtaaattttgaactggctccgtggtcgaggcggaatttgggatatcgagcgactgattaagttcgactggctgcggggagtcaataatttcattggaagacatggtaacggccatctcaggctgatggtccatggcgagagtggcctcagcattatcgaccgagtcggatgtctcgcggtgcaagaggtgagcatatgaatcgtcctataggtatatcacagtcagttcctaaggttccaaagaggtagaggagccggcagtgggaataaataccagtgcgacggctatgatgggaccgttggttgtagcgggaggttcattatcaatagccaggtatttggtgtccatggcggtgtcattttcatcatcctccaaacagtcttgatgaacaggaggtttggaatacttgtcgtcctatagtgtagccattgtcagtgtctgtgtctgaaagtgggctggaagcggatggtagataccagtttgctagtggtagcagggctgctaggaatcgtagccaaatcgatgcccatagcaatataattctctacatcctccaaccgatcaaattgttcgtgctcgagaaggtgggcatatttgtcgtcctatatagtgtaaagattgtcagtatataattccgaagtcgatatgtgagaaagaagtgggaatcaatactacatttctgtcgatggcagggccaatggaagctgtagccatgttctcggtgtcgggagtggggatgacgagggctttggtcttcatagcaatgtcatcctcattgtcctccaaccagttaaactgcccccgagtaagaagaggggaatatttatcaacctaatggtgtagcaactgccagtaggtatgtgtgatggaagtgggtatacataccagttcagtggcggtgatagggacggtaggagttgtagggatggcttgtgtcttcatagcgatgtcgttctccacgtcctcccaccagtcgaatggttcacacacaaggaggttggcgtatggatcagcctagatagtgtagccgtcgttagtacctaatcctttgaagcaatagaccgactaggatagggcaaaataccataataaactctcccattagggcttagataaattgatgaattgaagtggagatggaatagttggtagatgaagataagttcttgatgagatgatgaagagtatgaaggaagaaggaagcagatataattgctgaggatgccttttatactgcaataagcaaccccaaataggaacggcctcgaggatggtctttgctctagacaaacattaatctaaagtgtttcgtctgatctataactaccgcacattcacgagtctgtctcttgttatagcacgcccagcacgtacacaaggttgggatccattggccgtagaataaagtaggaaatagttcccccattggtgaaatttcagccgtctatgccttaagtcaaaaaatgaacaggacttaagtatattagatgaaagtccggagctaaaagagctatttcataccatagagtgaagcctctacgccgtcactgcctgtgaacacctaaactcagagacaagatttgtttacatgggtgatggtagagataaaggccagaaccgtgttctatctctactatttccgaagctaatacggttgaaccatttccaagtccataagtgtcggtcagttattaggttacttcaattgactttcagtgttttggattgctaaacttaatttcgaaagaacatcattatttctagcgttgtcaaatttatagagagtaagtagtgttcacagaacgtatctaaatcctttgttgtcgatctcagttttgtccttgggagatatgagttagcttatatcgaggcttcatggggcttgacactcaccagcatgccattttcaacaccttctgcctcaacctcctggccattgattgcttcgcggtctcgacgcttgttctcgaggtacatgtaaatatacaaagcgacaatacaggccagctttactgagtagccagcgagcatcctgtataaacccagtcaatcaaagcttttgcacaaggatgaatagcaacatacgcaatataagcactgctgtacccaggggcttcactggacttgaaagtctgaggtccaatgatgtttcccacgcagtatccagtgaacaatagggcacctgtcacttgctttttagtgtatccagcaatgttggagctaacaattgtcagactcatgctgaatcccaagccttggaaatagcatagccaaagcgcaacaaggcggccccatttgttactgctaggcagtccgacaaggagacccgctccaagaatacagatcgtgcaggcaaagatcatgcatgtaaatcttgaatggaatttgccatcgaactttgttgcaatataacctccgagaaggagagagacgaactgaacagcaccgcccgggatttgaagatattgagttccgagcgtatcaaatccgaaagtgccgacgatgatggaagtaaactgttttagttattagcttcgtttacatccaattataggaagacatacactggtcaacgccgagtttgggacttgtgcaccaatcgccataatgaacaaaagccaggtcttcggatcctgagccgcttgtcggacttgataccatttgaactgactacttttgacaccttggcggttgatggcaacacgctcgacggctatggcgcgctcacgctcgctgagaaatttggcagttgacggaagatcggggagaagtatcagggcaaaaactcctgtcgcgatggagaaagctccaaaaatgaggaatacatacatccatcgtggaagtccagtggtgatatgtccgaccgcatagccaataagactataattgattagctttcagtcttgattccaatgtagtttcatagaggtgggtggttggtcgtcacttaccctccgaacatcgtcgcgataccattagtgcagtaccatgacgctaatcgcaggggttgttcttcggatgtgtaccacatgccggtcataagaacaaatccaggagttacaactgcttcgatcattcctaacaggaagcggttgattgcgattccagcaaagttgtagcatgcaggtgtcgtcatgagcaagccgccccatactgtttctcttagcatggttcttgagtacacattcctagtcctcataggatatttcttacctaatgttgtaatcgcaaggaacttgccgacgggcagcttttgcaatgctagccctgcagggtattgcgcaatgaggtatccgaagtagaaaatggagcctggtcagattagtgatttgcattataagttttcagaaccgaagactcactgagccatgagtattgttgtccttttaagtgtgtcccttgctttaaaccgtagacagacgcaaagttgatgctgttcttgtccagatactgcatgagattagtacttggattgcaatgagcgagacatgcgaatttcccacctgcagcatgtaaattaagaacagtgatggaatgaggcgtatatcgatcttgcgcagaaccttcttggcctcctgtgctgtgtattcgagaccgtgatgttgtttataaaattcatagttctcgtcccgttctgatgaggtggttgatgagataggaggcgataccgacacttcggcttctttttgcgaggccatgctgtcgatttttctcggtctctcgaactcaaaaggttaaagatagattaaaagacgggacgaggtagagttttataaaaccgcacgcttgactggcagcacggtccatgtggaggattacacaataataataggagccacggcctacaacatacgcaaccccagggagttctatggacatagtggggatataagattccagctagtctccaagggggttattatgcgatgagacagaatggtttctgacaggggtgcaagtgatatctaaaatgtcgatagatgccttgacgggcaacttgggtgtttcgagtagctaacttaaacagcactgatctcgaggctctattctacctaaatgcatcagatactgtctttagaaaagtgacgaggtgggtggagccattcatgtatcacgacatcgccgccgcaattgcgcgtttctcgggccgtatgatcaacttctatctatttagaatcctgtcgcaattggcttgacactcggggctttgccgtgcccattggatcatcatttggagaaacaagaaaatcctgcaacaaatcagtttaggttcaaaatctagttctttgcagaatctgagcggggtccatagaatatacgtttggcttggcacacgtgctgcgtcgagttcaatttgagatcttgcgtattatgcaagtcattcttcaaattagacccataaatcccttctatcccattaaatgcccttacacctaaacatgttggacgttaatataagaacgaacggattccggggaacaaacctcggaaaccaggggccttgattatataatcattcccgacaactcctgcggcccctacgtcatatatatctttctagacactatttcctctgattcctgtcattagttcattgaagtcttgcttaattgtttttgtacatcttaaagagagtgttaaccacctggcaaaatgggatgcatgaatttgtatgttgtatggcgccaaaagcttcttgttcatagggttatcgggtcgggctattccgtgccggcggtctaaatccaggccaggccccaataactatggtcccttcgcaggcggtgatcactaacatggtctcttcttggttttacaatgcaaaactatggcttctctgatcaaatgggccaaggtagtatttagaagagccccttcacctcctcttcgctttccaaccagcgggtttgaaacaatcagtccatcttaaaccctcgaagaagaacggtttgaagggttcaaaaaggggcactactatcctcctaacattggcgatatcctgcgacagaagtaccaagcaccggaagccatgctaaaggcagaatggagctatcggattgatatatggaacgatggtgttatggtaagctcttatcgtgttgtcatgtcctgatactaggttcaatacttcatcactacgagaaactaggcgtgggacctatttgagggcaaggacttgtttaatggggacgatcccgataggaaagggtattccacgcgtgcgcatcttgctgaagtcatcgcaattctaggcccgcctcctttgactttaatcaggcgcgggacgcgaagccctgagttcttctctaaagatggtatgtcatccatgatatgattctagtagactgaacaaaagatttcattgcatgcggcttataatattatcccacggggcattggagaaatgatcttgagatccggaaagatgcgtccttgcacaagtcagaagaatttctgagtggccgaaataaagagatgttcttggaattcatgaaggatatgcttcaatggaaaccagaagatagaataacggccaaggaactattacaggatccttggctaaatggccgttcgaactaggtcagagaaacaatctggcgttggattatatttttcactggggtcgtgtcaacaagaattagcactataaattcttctggtatttcaacttcttgagatcatcaacatcgtcaacccggacgcgcgacttgcagacttcaagattgaccagtatcaacttgtacacattccaaatgtccgatcactttgttaccacgtgctgaacaacgagttcatttctcaatcaaaactcgccagggccctttccgaaaaagctgcctttggggactgtcaaccagggaacggacttagaatcggccgtattggatcccactgtattaccccaccagttgaaactgacagcgtggtagcccaacgcgaagaaaatgatgatggtcgcaatagcagttccggtatccatggctgcttgcagcaaatctacccacgtcttgaattagcgacttattctcaggagtggaaacttgacgaggtaggatctcacagttgtaacgcttccaccagtcaaatgcacgcttgcggatgatatagttgaaaatgaaaccgaagatgaaccagagggaatattgagctatttggtcagatcgagtaatcctaccacgaaactttggagagacatactagtgtttgctggaggaatattacccgccgcattaaagaaaatcgggacattgatgtagcgaacccagctgttgggatagcggcggtaaataaggtacacaagtgtagtaacaacgggctggagagtcagtaaactgcagtaatatcaaagtgtttgagaacttaccccgataaggaagaagtatacaaggccattgtacacttgtccagactggaacattcgctgcggaccaatagtgccccatattaaggaagcattgtacatcactttagcaccgttgcatgtgaagcgttgtttgtttgttggttcgcaaaggtcagtaatatgtccaaacatccatcgtaagactgttgtcgtcagctcaaaatgtaacacagatttgacaaaacatcatacctccagtctgagttgctgtcgctagaatactagcgtagatctggccaaagaacagaacacgcggaggaattttctaaataattagcaaaggtcgaccaagagagtacaaaacaggcataccatgtattgcccgagcttcaaatcctgagcaaaatccatgccgtgtttcactgcattatagccgtagcatttcaccatcagattagcgataggcttcccgggccaagcgtatccggcaatcatctccgttatgatattgaggaacacgcgctggttggttgttccttgcagaataccctcgggaacgatcagaagcattgccaatccgaaacaaaccacaataaagccccagaccggcagctccgtatcccagtatttggttgtcaagataccaagtcccaacaccaccaccgtgagaactccgtaccaccattctggaacctctttatattggcgcatcaatcggcgatgaatatcttcacctccatgtcgtgcattcttaaacctttcccaaatctcggtaccattgtaaaggtatgtatgcacaacgattgcagtaaccgcagcgaaagacagtccataggtcagagaataggacattgagatgtacatgggagagtactccttatacttgctctcgctgaagtccaaggctgagttgagcacacgagatacattgtaggattgtcccgtgttatcgaaagtgctggacgagaggagagggaggctacaacatcagcatattggaatcccctcaatcagactggaaacttactatgcgctgtaccacacattagagtagtacagaatcggcgataagaaaaggtaaaagaacacaacaaccgcaaaagcattgcatgtgatgtagaagggggtcatcagggggtaaccagcgtagtttatttgtgtccagtcgatactgataggtatcaaacctaatccggaattcatctaagcaaaacgagattagtttcatgtagtgattgccaaaattcatgcgagcttactccgaatatcgtgttgaccttctgattatcaggcgcaatccacgtcacaaaggcgaaagcgctcaaactcgtccagatgtagtcggggaaccagaataggacaaatgcaaatgccgtaatgtaggcaaagaagcgataacgagtaatagtccaaccattggctgacgtacggctttctggctcatgtagtgctcggaaaagaacagtggatgacagtgaagtaggccaaaccaaggcagcagggtacacaatccaacggcgggtaagacctgtcagaccaaacctgtgaatgatcagtgactgaataggatagaggaatcaggatgcacatacccaatcatctgtgtcgtcaaaaggtacaggaatgagaagccagctccgaggtcccggttccaatatacgggactgacgatcgctaccaaggcaccttgcgcgtaagcagtggtagcactgatattgacacactgttttgatttgttagatataattcataagaatgtgaaactttgcttatgctcacaataacaatgaacgcgtgctccttgattgtaaattttcctgggttgacatcgaacgaaagttttcctagaggtaccctccacctcggaagcttttcccatgctcttccaatcgggaaaacgaggatttgagcgacaacatatcctattgtgagggaaggctaggagatgttagtaaataccaagtggagttaattgaaacatacatatcgtaggccgaagaattgattcactccggagaaaaggatgacaaaaacggtcatcaatatccaggcccgaacagctgtgataaagagttagttcagccaaaccgagaaagttaatgacttactattgcaggcgatggtgggatcatctttgttggacacacaagccgcaacctccggaactaagaagtgttaaaatcggctgttgggatatatgggtcaacctacaaggtgactggtccccctccacactccatttgaaggcttcgactggtgtgagctctgtgagttctgctctgtcggatttgtacagccactctcccggatcttgattagtgttctcggattcgagatctgccgctggtacttccgatatattcagatctttggcaagatctttagagctcgccatagctgaaatacgtttgaccggatgtgcacaaaagaaaagtgatgttatgagagataaaaaaagacaggacgctgatttcttaatatttgtctgcagctggcaggacgcagatgtgacgatagatccactcaaaatggcaacaagttccttccaatatagtgacaatgccaaagcgctgaagctagtccaaatccatagggttcaaatggttttattatctcagttatcatgaacctaactggttagttacccagttatctacaacatatgttgtacggacacttgccgagacacctgctgacgcaaggcagcaaggccccgtgcggggatacgacgcattgacctagctaggggttagtcttatacattaaagagattccaccgtctgtatgagaaatattgtgattccaagtagtgtgatactagtggcaacggaggaataacattgtaaaaagtgacccataactggaaaagggtacttgtagaaatgctctttttcgttacaactcagtcaagacatgccaagtacaccaacaggcacatcttcggtgtgacttcggtgtgggaagagcttaaattatggatggcgtgccgaggcgggttgatgagcttatccccactccgtaacctctaaattgaccgcctttataaaccgctttccaatcaagtatacaatgccgtagtaagtcacatgagttttaaaccggcagaaccggcagaattaaaagggcggtgaacttgtttgagttccttcaccaatattgcggaggttccagtgcctttagattcaacgctagaccaatcaaagcagcacgatagctgctgattggattcgaggaaatggtgtcattattggggaaatttacccatagtccaatataggaatgtgtcatttacgagggaaacgatatgatattctgacgaaagaagtactacaagaagagcaccatttgtaggattgatacttccaatagaaccttggaatattcggcttgcagctttaaattcagagttatccgtggtagaccagcgatcggacataaccttggctagtgcgccattaaatgcgattcacccatgctaactactgtagcctattccggcggagaaatccgaaaggtaaatatagtacctatttcggaggagagttacttactccactaatgtgtcctgttaagtccgatagcagtgactctcacgaagatatatcttcattctagtcagtgagtgatatatgtcatccaggcaaacatgctcgcaggatcgagaaacattcgccttctaggattgcagcttggagacaggaagttcgataacataggaagtcgtctggatatatctagttccattcatgtactaaacatcaacgacgctatcttccggtgccaaaggaggccgactagctgccatattacattgtctgaacacgcgcacctcatcctcctcaaaagaaccaacaatcgaatgcatcacaccatgattgttgaaaagcaccagatcgccctcctcccagtcatgggtatacaagtagcaaggatcaatggcctgtctttgcatcttgtacagccgttctcgaatctccgtgagattatccagcacctgcccgttctcgagatggattttccgcacacatgttgggtaaaccatcattgcgatcttgccagtaacagggttcttccaagccatggggtacaccctgatcttagaagcctcaaaaggaggcaactggtcttcggccagctccaacccttctgatataatccccaaaccattggagcgggacttggccttgctcatccagatgtatggatgaggtgcgtactcagccttgctggtgcggacgaaatgtttatcttcctccgacaacatctcataaaggcggtatccactgaaaaacgccgttgttccaaggggaacgtcaagtgtagtgtcggtgccatcgtcatagcggcagatctggcggcggcccctggggactttgacagccagcaacgtggtaaccaaaggcggatcaagattgtacatggccgagtcgatgtgccagcggtagaagtgtgtataaccgtgatcttcttcaggcgagatggggttcttgtggaatgtcttgtggtgtgggtgtttgaggcggatgtttgagagtccctcatactcttcgaccaagccgctgccgataacttggacttgtggttgatgagggatggttgtcaggtcagcatggaggacgctgcgcttgtcgattgattttccatgactataaacaccggcggaaggatcgaagcgtcgagtgagttcgtactgggcacgtggggagagtttgccttggcttttgatcacgacgacttgattctcatacaatgtccgacggagaaagtcaaagtcgtcatctaatatgaatcagaatttgaacccaataaagctgttttgagtattgcttacctgtcattgtttcaacatcgaagccggtgagttcagccccaaagtctacccgagaatcatcgggcttggtgacaggcttgcaagaaagagtcatggtagccattttgaataaatcagctgagataaatatcaggatgagaccaatatgaatactactgctgagcgaccgtacgtgctttatactgtttgtacatagtaccacaaggaccaatcaggacggtgcgggtgagatgctgcggctcacccgtcccagctcacccgtccacggagataggatcccaccattattgccaatccatcgagatgataatacaaaaagcattattcgttgagaaccgaacgttccgagacgttggtcttatcaaaaatggtggtacacatacgtggactcgtccgctctgctccattctcgtctctgcttaaaggcagcgttgtgctcaacgacgacaatatatccaacattacctgttgaaacgaatctgaacattgttcgaaaacacgaaatgcctgaatcaacaagtttgaccttcgacctcctctctgatgagatcagacaaagctccgccattggcgccgaagtccaactgcctccaggaatgcccttgctggatttggaccgcttgaccgacaacgacaaagatactctccgaaaagctcttttcgagaatcaagtcattgtcatcagaaaccaaaagggcattgaccctaccgtcttgccaaagctcgctaaggtttttgatcccgaagcatccgacgtccattccgcaggggagaaagctgtgagtgatcccaagaacatcttgtctgcatacaaagcaggacgaatccctagagcccaacaagttggaatcattggctcggggaagttccaggattacgaggggctgaaggagttggaggtggtgcatcttgttcgtgtcccccgtctgaccgacgtactaaactttcatttgactgaccagtgatacaggaccacacattgttccacgaggagcctctcagtcaagaggaattagatgatggctatactcgtccataccggtggcacatggatactcctttctatgagcgcctgccaggcgaagtgaccatcttgcactcaatccgcattcccaatgtgccggatcagaagatcaagttccctgatgggaaagagaagactgttggtgctggagccacggcttgtgagtttatcgaacaaatgcagataggtgcacacacttaccgaatacagtcttttctggcgctcgcgtattttcgttgttgacgccggaggaacaagagtttgctctgaataccacagtcacctatgctcctcaagcatacgagtatatccgccaatgcaaagcttccgacgatggcttgacgatcccgaactttggacgggaggtaccggtggaaaaattgtcggaatgggcgtggggcaaagtcgccgagcacccggtaggttgctattctgactgcacaccaatagtaatgagcatcggctgacaactttcatcagatggtttggcgaaacccgctgaatcccgaccggccattcttccaggtgcatgggtgttgcgtttacaaacttaccacgcggaacccagcgacgggcgagatcacggtaatggatgacgtcgagaaggtcagagaagtggtgtacaagatgcagagtaagatatatgccgctgagaacatctatgcccaccattggcaagagggtgatgtggtcattttccacaacaggggtgtaatgcacagcattactggccaactagccaagtacaaggaagaagaggacaagaggagattgctctggcaatgtacaatgacaagcacaactccccccaagcccttccgggaatacgagggagtcaacgacacgggttatgtgagggcataaattaagatgtaccaatggctagagtagctcaatgaaagaatggcttcgaacggctgtgaattttcgcttttctcaaaactgaagagggtcatgtagagtgtggaatgttccattgaaccatgcgtcaaaatcgatatcttccgctgtatcccacgccggctgcatttcgttaaaatgggcaccgatcacatcttgaggaccggaatttgagaatctgctaacagatgtgttagggctgtcaggacctaggttcattctcgtaaaagtcgagaacttagccagaatttgaccgaaatcgatggttttgttgccaagtcctggacccgaggctgcatcggccgtaaaaattgcatcgattaacgcaacgcctcgttgagcaagcacgtcattacttcgatcagcaaggcgggtgcgagccgcaactattgcgtccttgtggctttgagcaatagtggcttggttttctgcagttgcattaacctcaaagcacataatgaccgcagcggtaatcgcaaaggctgtatgggtccatatcgagatatccccttctcttacaattacctcgtgctcacgcaaaattgtcattgcagcggcaacacaggtacgtcttgaataggtatatgtctgatcattgaaagatcggaagaggaagggccgatgaatcatgataatcttctcggctgccgtgatagcgagacttcgtcgagcgatagccagccatgggatttgtgcttccttcgttttatccgcacgcaaaaggaaagagggtatggcttttacaatggccctcattttctggtctatatgcaggatgtgttcgtattgctctcgcataggctttctggatttcatcggaccgagtccgtcaactagaccgggcatcaattctgccaaagtcacgagcacacggatgtaagtgcttatagtgggagttgtgataggcatatcagtcaagtcataatcatctgcgttcatgggagggcctgtcgagaaatgcattggagatatactgtaggtgtcggtaaaaggaatagcgaaatggtcctgaatgatcatttggcaccataccctcttccccacttctcgttccactctttcatcccattcttctttgttttgagcaagtttcgttgattgatcctgaattttgtggatcccaaggcactcggcaatgcgcactgcagcattgaataaagtcgcgttcagctgactcaatccaagattatgagcgacctcggtcgatatgacgattgcttgaacagagtacacggagaggttgctgagaaaatgtgaattgtagagggtctgcaccatagcagagaacagctgatgtgtagattgtatcccctggaggtcgacatcaacactctcttttactttcgtactatcctggattgagctgacggtggaactcaagacagaaaggtagagtgctggccagagagggtcatcaaatttcccagtttcccagaataactcgcactgctcgagaaatgtcggaccatgaatacagttatgatgccaagccacatgacataaatgaaacttgatcagcttctgggcatctgtcgcattggggaaaaaagagcgcagctccggactaggatcatagactggaagaggactcgtccctgataaagattgaagtccatctttgcgatactggcacgagcacgtcctgtgagggaaacatccggcagaattacgaccccaagcaagatgttcaatagccgtgagaagggacgagtcaatttgatgtgatgtattttcagtcgaactgtgggacactttgccaagtgcatggttctcggttgtacttgattcccgttgtgtcgatgtggtgtcggatacctccgattctgccggatccatgccggtctccagccgaaatatttgatttttgatcttttgaatgacaagaggcactggatcagacggggctgattcgaggtccgccaaaagcgaatgtaaaaattgaatctctgacccatgttgcacagcgttgcgtctaagctgaacgatttctattgagcacttcagattcaagcgtttacatctcgaacagggattttgtttgtcgcatttgcgcttgcgcttcgtgcattctgtatcatgtcagtcgcctacgagacccgagtcgcagcagaggatcggcatttacctcggcaggcttgcggctgacgctgcgatacacggaccctggtcgcttgatttgacgcggtgtcattcattgcccgtcagccttgcatttgattgcctctattttgtcaatttgatgagttggataactccagacctagattttccgttggtactaggagaagtggaatgtgtgagagttgggggcgggagagtctgagacttggcactgataagcacttcgatcgatttgggcaactattaacccggggacatccacaacatcccgaggtcttaaatctcatcagttgttggtactttattcttgtgtatgttatccctctgtcgcttaaagtattgccacacggtgggaaatttggacttaagttttctacgaatccgttcccgcgccccagagatttcagtcggattttttcaaatcccgcaatccaaccagcggacttccttcgattttggaaaagtcatgagcatccaagcatgcctgtctagagttgaggaagctaggctcggctcgggcgaagacatcgttctcgtatgctgcgagagaggatagcaaggctttggaatcgaaggaactaattatggtaaaagcgatgattaacatgagtttaaacttggaggattggaggtgattagattcataccttggctggcgcatatcgacacgcgtgacgagatccaacacatcgacaatcgcgttattggcgccttctccgcggactagttgaagttagatatgcgcaatctatcacgctcgcgtaaacatacacatggtcattgtgtgagccgaatcacccatcaacaccgcccgaggatgcgcatgcgccctgcccaggctgaacatccagtcttccacgcgaatcgatcgcacttcgacatcgtggggaagcttttgcaccagcgatcgaaatggttccgaccaattatcagtcaacttcttcatgagcgcgaggcgctcggcattcgtgtctgggacagggattcccttcgaatccgcccaggagatgatgatttgacagtggtaacggtccttgctactattctcgaaattgtttggagtatccagaactatgaagacatcagcaacccgcagaagagaatagagggtttggcggacctacagctgaagaataaaaacacgttcgattcaggatgcgagccctgaaagatgaaaggatcgattgactcaacgccgcccatctcctcggcgctgtacaatgtcgaggcacctagaagctgcactggcaagtggttcatctgtacgttgggatagaggatctcgcggacacgcgaccgtgaaccatcgcatgcgaccagtagccgcccggtgtgagatgtgccatcctcgaagtgcgctgtgatttcatcggctgtagactcgatatttcgaaggtttttattccactgaaagcacggtgttagcgctatgatagtatgagaaagatgagatttcttccaagacgatcatatcaggacatacttgaacatccacgccggtactcagtaactgtcgcaagcgaacgcgactgacgcgaatgcgctccgcggcggggatattatataatgcgtctcccgacttgaggtcgaaaaactggaagcgaccgacgtcgccacgggcggaagcttctttgttgacgaaggtttccgggaaccgctcgaccaggtgctccggcaataattcacgcagggcggggagtgaccaatgcagcgtcaaaccccatccaccactacgggcatcaattgcggagtcgcgatcgaagatcttgaacgcgacatcatggcgctgaaggtactgggccagtacgaggccactgatgcctgcgccgataatcagaatgggagattcagacatggtgggcatgttacagtgcgcagttctagtagcactacgatttgattgcctctctatacaaccccggccctagtttactccgtaccgaatgagtcgtcccaccgcttggcaagtccgcaaagcccaatacgaaaagtatccggatccttctggggccaactaacccgaaaggacacaattaagattttatagggttccatcggcccctgggacggctcgggttccagctcgggcagatttatcaaagaaatggacttgcctaattaggagagaggccaggacaaagacatttattttacgtcatcctctatattactcaattaggattatagtttcgggcgatggtgttgccttgtgctagccagagttggtttaatgaagttacatcttaattggcaccggcgtcgtatccttgactcaatctactcatgtctcaggcgcatttccgcattgtacggagtacttgtacacgcgggatcttcggggtccaccgcccgagcgcgttgatcctgtggatcccgctttatttgggggcattattcggacaaccagtttgaatcagaaatcttcgagaaggatactgtcgcacggaaagcgatcgcagatttctcgagtcggctaataatgatggctattggcagagggcgagccggatgttgcaataacatggctatatattattgccactaagtcagccacaaaggcaaggggtgtagggattacggtgctagcgggaggggcaggcatgaaagaaaagaaaaaaaacatggatattaattaattcgaaattgcgtccaaagagtgttgaccggactccggacaaaaaccaaaatttgtgcgagttcgtcggcgggatcaagcttccttcctatttggttggcttgccctctaaagatactctatactcgatcgtcctctcgatacccccatgatcgggctcctgactagccaaaatgagctcctcgcttggtgttcgctttagctgtggacggccggaagcagttgactgcatgtgcgaatgccgatccttcgaccaattccccatcaagtagcctttgccttggctgtcatagtaataattcttgcttctgtcactggttggaccgagtcctcgcacgaagcctttgagtagaggtgccagatatggaatgcaagtgacaatgttctaatacacaaatcagccattgtctcacttaggtagtaagtagtcattttcacttacgcccacgttgaactcgatcgttccccataacacaagcattgttgagtttccatctccgaatgccacacgttgtatctgagttagccgcatgatcgagcagactgtggtgaagagaccgaggaggaaaaggcacacaacaccggccttctgtgcagttttgatattcaggctaaggagcaatgggatgggaagcacgatgatggtcacgtcggtgatgatggtgtaaatcgcgagaccgtagaacaggcctcccacgggaagacatgtgcctggtacatgggcgttccatgatcgtcggatctgttgcggccaaatgattatcagtgtgtggtcgcgtatgtccctcgtggggagagattcttaccggtgtgcaattgaacagcaggctcaaagcaccagcgatatgacccaacgtagacgccgcgatcacaatccagatcacaattcggtaaagacgctttgaggttccagagatcagccgcagatagctaaggcaaagcgaagccttgaaccctgcgatcccaatctggtaaaatggtcgtcctgcgtaattaatctagttgtctcttgtcagcttgccggtagaatgtaataagtgcaaggcatcaaactgaaagggagaagatattgaccttcgtatatgtagagtaatttgctgctggccgttgcttcaacggcagccctagcccatatcggctttctgcgatggtgagtatgtttcttgcagcaaaaggaaagctggaggtgcctacgagaaatgcagagtgcactgtatatcacactaaaagcctgctggaatcagtcgtatggtcccttgtatcacgcgcaggttactttaccatactaacaaccatcacatagtctgccgccgcccatcgactggctcgcgctcgaagaaaaagtcgcagggaaaccgtgcaaaccatcaaaatggtgagacttaaacatacacccagaatgagacggtactgcgaggcagcttcaatctcgggggaggcattatgtacccagcccattgctaagaaattgtgcgaagggatacaagggagagtatggacgaggacatagtcaagcgtctaccagggcaggcagatagatataccgaggtttctttcaccaaatcattacagcatacagtgataaaagtgaaagaaatgccaaaaatcaccattacattagactttctttggtggaaataagaccgataatgctagtcatgtaccctgtgctcctcgctccatttctccgtactctcccggccttgcagggttgtttacaatattattgtcctttagctcaccccttcataaacttcatgtaactcccaacacggaaaggtcctagggtcttggactattggttctgattcgttgctagttgtgaaacgtgtagccacgcgatccccacggtgattgcgacgttacttacacttttaccgcatcaatccattgtatttcccaccttttcccaccaccatttcttaaattccttttttttttcatttcccccccaacttccctattaactacgttcttccttgtcggttactcaattgttcccagctgcgatgggtgaaatccaacccgaggtagtagcacatccttccgcagatgagattgatgatgccgtggtatatcttaaaggccatgaaaaggaggcgctcgactctccagtcaatctgcgggcactgcgccgtaaaatcgatcgaagattgatcccttatatgttttgctgctatgtactgcaatttttggacaaggtcatgctgaacgtgagtttgactttcaattcagctgtctgggccatattcctaacgcaagggtgatttcgcacatgtacagtatgccgctgttatggggatcaaaaaagacttgggactcgtcggcaatgatttctccaacgtcgccacatggttcttcattgcctacttgatcgcggaggtacccaatggtgagtattatgatttatcttttgaccatcactgctaaccctcgattcacagtatatttcttacagaaagtaccgcctgccaaatggctcggtggaaatgttttcctctggggtgtcgcggctgccgcgtcttctggcgctcgggggtatcggagcctgctggcagcacgcattttcctaggcatttttgaagcgacagtgggaccatccttgatgcttattagcagccagtactacactcgaagcgaacaagcccctcggttcactgtgtggtatatgggtcttggtgtggcacagataattggtggtatcatatcttttgggttccagcatgtgcatcatgccttattagacagttggcggattatgtttcttgttcttggattggtgacgactgttgtcggcggtttaacctttttcttcatcccggatacaccgatgaaggcaacctggctgtctgataacgaaaaggtggcactccttcaacacgtcagcgaaaaccagactggagtctggagcgcaaatttgaacctgaaacaaattcgggaggccgtgctcgatattcagctgtggctcctaactgtgacaacaattctggtgtgtcgcacattccacctttcgcccccttgcttcaacatcccctgcagttctattgactaatactgcatagatatccgtgtcaagtggtgtggtgacgacatattcctcgacattgattgccggatttggtttctcgggtcccatctcggcgcttctcaacacgccgtcgggcatcgttagcatctttttcacacttctcgtcgggtttggcatccgcagaacttccaatcgctgggcatggaatatactctgtaccattcctggaatcatcggcgggggcttactatccttcctacccaaaagcaacaaagccggtgtgctgatcgggatttatcttgtcaacgcaattgtagctactcttccgattctataccagtggaccatggccaactgcgctggacataccaagcgtgcatttgctagcgcgcttgttgctgggtctttctcggtcggaaacatcattggtccacaaacattccagtcacacgatgcaccagaataccgaccggccaagattgctgttcttgcaactcaggctgcggctgctttactgtctgtcgtcctctttttctattacaagtggcaaaaccaccgcagagatcagactaagagcggtgttgatgcggcggaccagactcggtgggctgggctgactgataagcaaaatcattccttccgttacgtctactgaacatttgatggatcggggcttgaacatatactgtatataacaccgtttgcttactctgtttggctcaaaaggcatttccttggcctgccgtgagttttctggactaaatattcccgttattcgagatggaattggtagtcattgttcatagaagtcaaggcgactagccaatttctcgatgtgaatccatctctaccggtgctggctcggtgttgtcttgtatttcttcggtcggtttgaaataaaagccatagattgatagttaaatgtaaaaatgccattccgtaaatcggaaacacctaggtacttttttgacatgatattgacacacctcaagctaaagtatacactttgcctataatgaaaatagcaatctatcagtcatctggatgtccttcgtatctgcacgaatcccactgccatgtcgtctatacagtggcattcgagcctcttggcagctggtaagattagaactcgtccgataggttggggcgcatcctttggcttaggactgttgtatgtgacaagaagagcctgtcttcaatcaaaacttcaagttccaggttttcagacatggcgtcgagtactatgcacccatggtattgactcgatccctaatatgtaaacagattgttagctcacagaggaaatatccatggctgggcactggtcacaaagcccagatctgaccacgaaaggtgctatgtgtgagcaaataggccactccccttgaatcgaagtatgtagagatggacttcatgccagtcactatatcattgagtattgtagaggcgtcaatgtcgagttgttgaagtttctcaacatactaaaccagccgccatgggatcgatatagtgtaaacgtgcgtggatggtgtcactggttagatgaagcgtcagcatgcaaatagaatatgggaatacaggcaagtatggttcaacattcaaaagatggaaaagaaattggtacagcaaggaaagaagtgaagaagcataaggttcatgatagaatggagcaatgaatgtgggaaggtgaacatcggtagttggatgggacaaatgagctggagaagatgttgcgaaggagggaaatgaacatgatcggaaagaaggtaaagcctcagggataaaacaccgggggggagaagcatgaaactaacatagtatatcaataacatcgagaagaaggaacactgctgaatacgtgtaagagggaggaggaatagcatcaaggtaaaaagaaggaaggaagaaatatgtatagcatcaaaaaaaatccccattcatctagaccgttcctagacctcaggagaggagtatctcctccggccattctcctatatgcctccacaaaccgtccggaatacggcatccccccaagggtgggagcgcactaccaaacaccctagacacgtatgtctaggccgaaagcatgctttgtcgctgacccaagggtgtttgccttgcatactgaaatgcttgtagactttcttgagagctttagcacataggagtccgaaccgacagtggggagctaagcaatacccgttaaggccaaacgcccgttgagaacgcccctcgcaagggacgacccggtcatactaccgctgggccactggggggggctggttgtaatattggtgtttggattcttcatataggacaaaaccgtaaaaagatatgtcactagagaatgttagagcttcgactgctctaccttcctggcctcgtgatagattccgaaacgaaattatgagtctaggtagggccatgctgctatttgcaaagtttcaaattaattcgaacataggatggtggtggttgataaacactttgatagcagggtacatctattcgactcccaaaatcgaagctattcggacacctattttcggaaggaacgacgacaggatggatttctgaatttcaagatcctgcgttcgatccctggccatgtggaataatttgagaggtgcttttctatattttctggggtttccaccatcacaatagcccattcattttaccatcaaaacacctacccatcccacacagcgacaatgaagacacccgccaaggattacagaatacccacttgcccttcagaaacccgagatctgagttggcgagatctaaggcgagtttgaatatatgtaatagtattactatcaattattctcaacatcaacgtcagttcccatgacctttccgagacttttctccgccgtctcccactctttattaattacattgattacccagtcacccctgggtcggagtttgaatttgacctcctttggcattgtcatgaatcctgccacgaccatcgcccatggatccaccagttccccatcagcgggctcgatgtcaaacgcccacaggagacaagcaacatgcatgaaagatccatcggtagcgaccctctttccttggcagatccggcgaccctgcccaaagaccggcaacggaagatctgttcgttgtctttcctctccgccatcatcgcgttggagccaccgctcgggcacaaagtccccagtgtcgcctagcttgggatcaaataccttctcatctcgaccgatggcccacgcattggccatgagcgtgacgcctcttttaatcttgataccattgaactcgtcatcccggtccgccctacgaggaatggatcccggtgaaataggccgccaacggaaaagctcatgcataatagcgtcaataaaagcgagccccgaacgatccgagaacttggggaggcggtcgcgcccgacgacttcgtcgagcaaggcgtgcgctcgcgccatgaatgacggttggtgcagcgctgcaatgaacaaccacagcagctgccgcggtgaagtctccataccaccctgaatagatgttgcgagggtgaaagcgaggtcgagatcaggaacaccacctttggagtacttctccgctgtggcgatggcttgcttggtcgagttccagcctgctgagtctctcccatgccggaacaagcgcatatagaggtccacctgcgtggcgtacagcttatcggccgctctcttccagggtgacaaaaatgccggcaggtggcgcagaggcgggataatatccggaataccggggttcgcagcaagatgggttacctgggtttggatgtggatgatctcatgcaagatatgttcttcaaagcttgggatacgcatgccataatgcagagcaagtatgacactcgattgagtgcgttcaagcagtggatagatggtttctgtgctgattccttggggaaactgacgtgtagcatttgagagatcaaataataactgtttggactcgagctccatcaaaggatggtactgtggggcggcaagagcgccgagactgggcgctaggatacggtggtggaacttgaggtgatcatcgtagtcgtgcatcagagtaaattttgactgcccgggctcagctccggtgatcatttccatgctgacggagggcggacggttgctgtaccactgactacggcgactgaacaactccgtcacagcctcatatgaattcaacaccacaatcggtatgagcccgaagagcttcggtactgcaacaggtccattctctttcgtccatgagtcccagttcaaaagcggtttatcaattggggagctatggagatcgccgattagaggaagcttgaggaggggtttattttcttcatccctttttcgtgtgacgatgtagagcagtgtcaacagacctaacaccaccgcaaccgtgataggagttgcagccataaggggtattggagtttacatatcagatgctctattgcggaggaaaaaggggacgcagtcttccatagcgcaaacatgtgcatattcggttactgtgccaagctttattatctctgttagacctcctgcaattggttttggaggccaaaacgcgctaagaaagcgatggactcgttgtgactgcataagcggcatttggcccaccaatgactgaggatcccggagactgtcggggagacttgtttctttcatcattgaacgtgacaatactcgtgttattgctagatctctcaacctcaatctgcgcagaatttaccaattactagttactcagttactacaattaatcataaaaattcaggttatctgatatcgatgttccgaaactagacgcattgtcgggcgattttggcccccacggctaccttggacatccctgctagttagctgcaggttggattcaaattacctatttaacatcgttctcctatttcgcttcgctgggttcccttcgacaatggagaatggtcgttaccttccctatagagacgccagcccaaaggcaggtcttgggcgtggctatcgctttctctatcctctctgtggcagcagtatgtctgcgactgctatctcaccatcttgcgcgtaaaaaatggacattgagtgactatttgataattgccgccggtgtgagtattcgcccaatcaactcgaacaatatctactatgctaaccaatacagattttagccgtcggtctccagtccattagcatcaccggcgtaatacaagcaggcatcggctacggccatgtcattacaattgcgggcacatatggaaccgagcctatcaccaaactccttcagctgatcgtcccattgcaatttctctgggttctgagtctcagctgtacaaagatttccatattatccttatatcttagcatcttccccgtcacttgggtcgtgcgaatctcttggataacaatgggtgtgattgtagcctggactattgggacaatcctggctggatgtctgatatgtcggcccttcgctttcaactgggaccagactattcccggaggatcgtgtggtaaccaggttacctcattcacggtgaccggagttatcaatcttattaccgatattgttgtgctggtgacacctatgcccctgctatataagttgcaaatggctaggtataagaaagtgacgtttatcacaatcttcggactgggaggcgtgtaagatttgcacaaccagtgaaagaaacacaagaggctcttgctgacctagaatatatgtatagcacatgtattatcagcatccttcgtatctccatgctctccacaatggacttcaccgacatcacctactcgattccccgtgccaacatcttcagtggtctggagccttgtctcgccgtcatcctcgcttcgatccctatgatgcggcccctcctagggcgttcaacatacacccccgaggtaacagcccacccgtcaaaaaagtcttcgcccccatctggaaggtctaggtctgctggcgatagtgagttccggccgcttcaggatgactcgagtgagctgtgtttacggccaatcgggccaaagcatgaggtcagcatcgcagttcaaaccctcccagagacgagagggataccccgtggaagcgaggactccttcgaagccggagagagcaggggtatggatcagatgcagaaaggaggctggattatttcagtaaagcaagaatgggctgtgttgcatgggcggaagtaatatcaagaccttccctagaaatttattgtatataccaaataaggaaatatatgtcttgctggtcaggcattcaattcaaaatgtcttctatggcaatgtcatagcgtagtctgcccagggactaggattcatatcttcactcccggcctcccctgtgggaatttggcttggggcctcaaccccgtgacggccagattcctctggcaggcagcttgtatcatcgttagccattgaactgaatttatctgggatggattcttactatctgctgtcatcttcgacaatgacttgttgccggtttagaagcctgggctgtgttagtgggagtatctgtgtctgtggcatgatgttgggatatgagacagttgagtcaagatgagataggagtcaaggttgattgaaaatagagagtgaacgaggttaagttgagaagagagagcaaaggaggttagatagctgcctgtgtaggagcgtgttattattttgttcagagatctcccattgttagcgattatcttttattcttcacattcagccctctcatgtacacttcaagcgattccccagcactcagattcaatatcatcacaatcaaccatggagtcttcatccaaaacattccctgcacccgtgattggagaggatgaagaccagcctgggttctgggcacatagtgctctcaataacccatagcctcatgggcgacgagttcgtgaacgctcggggactttgctacatgcagtgcaagccgcaccacttcgtcgtgggccagccttacgcactttgaaaaattgggacgatttctattatttgggctccaaaatcattagaatcaatgcggtcaaatgtcatcggctaactttgacagaataatccaactggcagaataaatatagactaggcctaatctagctagacgatactctctattacgggggaagagcataaagagggaaacaaaggcaatggagggggaggggctcttgttcacgaccagatcaactcagctagttactaaagtagttgcttaagcagtttctcaagcagttttgcaagcagtttctcaagcagtttctcatgcagttgcttaggtagctgctaaattaattgacgatgtatcagttgattaagcagttaataatgatatgccaaaagggacttaattttattagtagtttacatacaaattgtaggtacctaggtgctatgaacgctaaacctaaatgggtcacttacgatataatgaacaaacatctcatcttctccaagcgcccggacaagccgaacagttgatgaaaaggagttcgcatcgatcgggggtagtgtaagcccaatgacactgtgcaacgaggcatatgcaagcatagaggccaagtcgcgaggtccaaatattggaataatcatgacgttctgcaatgcagaactaccagcgattaaactggcaagaacagatactacacttgatctaagccagaggcaaagagagctgaagaagaaagaaaagaagaagaagttctgggggcagggccaccttcttataggtatcctgagggcggtcggtttatgccactattcacaaataagacaaacaacgatataggctcgcttaatgtaaatggtaacgtgatgactaagacaatcactgttgatatagctggatgttctagctcacattctatagaatgctagcgatggaacaagatcaaaaagtaatgcgtctgcttgactatttgtttcaggaggaaatgatgcagtcgactgggaaaccatcccaaggttgcgcatagatatgcgctcggactacccaaaccgccacgccggagatacccaagatgcccaaggagctagatgagacacttgcaaagagatccttgctcgggcctcgcttttcttatggtcattcacataatcatgcggcgtcatactatatctatatcttacgccaatttttcggtttcttttccatcgccgggcaggacccttgttttgttttccttcccttcttaacacagacagatccccctcaggaactcatcttcctcaaacactcttgattctccttatgcacatggtgcctacttgtccaaatgactaaatacagcagaacagccaatgctgacggcagcgagaagaagccatcaggcataggtcttgctggttgatgtcatgaagaaaaggtagacaaggctctcctgcaaaggatggcaaaggaggtcgagaccgctctggagaagtatccaacagttgccatttccagccttgagatcaaagatgtcgagaatgcgttgaatcttcatctggaccgaagagacaaagagcttgagcaggttactcctattactccccctccccccccccacgactcctaggtatggtattatcaagatcaaggtatcacagagctaacattttacagtggagtatttgaagttgatcgatggagcatcgaaccgatcgccctccacagaagtcagtgtgcgctggaccatcgacgccctgctacttaatgcccattcaatcgcagcaaagcgcacacctgttgcacgccctatcgtccagagagatagctcgtacacgcatgggccggtacgattgaaggggaagttgataatgctctcggcacggacagactacggagtctggtacggtgaaactgaagaggttgctttgaatgttgtgattgtgaaagctaagaacatggattcggattcgggcgtagcgcaagccctaggctatatgggtaagtggtcgacaatatccattatagtaaaccacctgagcagggacgctaactgattcaataggctgcgtacaccgagagaggaagagtcttcataagcaggactgcaccatatacgggcttgtaaccaccggggagactttccgcttccttaagatttcaaatgactccaaggtacgtagttttaaattcgtgttagctattatctcatctaatatatatcagtggttaacgtacgttttggatgtctattcgtgcagcctttcagggccatttggacttcttgtcaacatattttgccgtgccgctgtgatgtcccctgcgcactcaaaggagagctcatgccaattccaccagcaagaggcatccgctgatagcgcccctcttgagaccgttgacaaggatgataagaatagaggactggtatgattagcttttatgtttagtgtagtgtcaattctacgcttttccattttcattttatggtgcctttttccatttgagcattgaagattatcgatagcttacgcttgtgtctgcggctcctggatgcttaaattatttcgtgttgctcagacctttcctggacctctactatgtataccaaataaggaaatacatgccttgctggccaggcatccagcttgtcattcgctctttccaacactgtggttggtccattgttctttccattcatattcctcgattgtttatactacattgtctcgcacctgcattggtttccaatttatagcctcgcgtgtcaacaaacctcttctactgaaaactatcttctccaaggaacgcttctcgagatctcttcggtaatctacatacagaatgttattcagatatcttctcgcgttggcgatccaactatgctgggttgctctcgggcttgctaaccaagacgcgacaattgtctgtttaccttccccaaaattaccatgataccaaagaaactaacaacagacagacgatcccatggatcacggatgcacctgattacttccagggctacgggggcaaggccataggcgccgtatgtatcctgtctgcctctcctgtgatacatcattgacaaccaatacagaaagatggaacaacaacctacggaatcaactgtctctcggaccaaacagcctgccacagatttactccagatctgaccgtcatctacggacccagcagtaagaacatagcagccctccaaataggacatcatactgacttatatatatagcatacgacatgattgccaacggctacagattcgacttcacctcgggatgcacgctgatgggctccccgacacccacaagcgcgtcatgcacagaaacaaagtccttgcacgaagctagctctatcacatcggccacagtggttgttccagccacgggcgacgattctaccctcggaattttcccagcaaccttgatcgtgacagacactggagacttccctgtgccttttaccgcgactgaaaccaaaccttctgccaattctcatgtttcaactagtgacgcaagtttgactgcaccttcgacagcgaccgcgaccgcaaccactgatcccctcagcttagcttcagttgggttcctgaattcgacagccatgacaactggtgcaccaacttatttcggcaatggcacctcgccggctgacaggaatggcacaacagttacggtgactgttcttgctagctctattccgtgtcactgtgaatgtgactgcagaggaattcagaccactaaggccactatcactgtcccaatagcgatgaaaaaccacggagtcaagacggctacgcccgtaggattgatgtgtggaatggtagttggcgtcatgttctggatttgaacttgagttgtcaatatgttcaccaacatggattttgccatttggatatcaaccacatgatgcggtggatttgaggaacagaatagtttgaatctgaggagttgatttacaattatccaatgtacaacataggaataaattccgccagggcttgttaaaaatagaaagatgcttggtaacgcattgataatccgcaatgcctctgctgattaatgagatcggagatttgtcaattccgtccgaggtgggcgcggcactctgattggctgtgattggccaatttactccgagatggagccctagagatggcgggatggagaaagtgatagaaaaacgacgtggatttatggatttatggatttagggattcgcaatccacattatgtataaagcccccatcccagctcacctgctatttttccttctcggaatcgctctataccacttcaccccgctcctaatccacctgtctaccctcaacaccttcaaaatgggctccactcaacccgaattcaagaacgcggctacctccactcttttcgagttggtgaaggctcgccgcacatactacgaccttaagggcgagagccccgtctctgacgatgtcattgatcgcattgttcaggacgccgttctccacgttcccagctctttcaacacccagacctcccgtgttgtcctcctgctgaaggaggagcacaagaaggtgtgggatatcgcccttaatgctctagagggtctggtcgctgctggccacgtccctaaggaaaccttcgagaattccaccaagcccaagctgaatgccttccgcgctgcctatggaactgtatggtcaccctccccaatatgacaccattccgtgtcaaaatggcgaatcaccagcttacccgttaacacaggtccttttctttgtcgactatgagtcgcttgctcctatcaaggagaaattcgcgatctacgccgacaagttcgacccctttgccctggagtcgaatgctatgtctcagtaccttggtatgtgctcttccccggcctttttgtagaaacaagtgggttggaaactaactatcaccaagtctggactgcacttcagtctgagggcttcggcgccaaccttcagcactacagccccctcatcgatgagcagattgccaagacttgggacatccccgcctcatggaagttggacgcccagctggtcttcggtgttcccaactctgggcccggtgagaaggccttcgctcctatcgagggccgctacaaggtgttcggcaaataagcacatatagatgcatgcatattaatttagcaatctagcaatctagcatttacgaatgaaagagcaatgacttggattttcggtttcaagacaattgtgcaaatctcaatagtaggccgcactacgtagtccaaccctacctcagcaaggaggatctgcatgctcgatatgacgtgtctgcatgtaaggtgatcctgatcaacaaagcttagtcgaacatccaacttcatagagtttgagaccctgaagatcaagtgcagatcagaagaaacctcacagaaacctcaatgatcgtcacatgggcaggcacaaccaggttcggctctggtaaaaaatccaggacctcgggggttgtgcctgattagtaagaatgtttagccaattaggaagcaggcgcatatttgacaccaccaggactccgtatacagcgctatagttaacaagatggctatttcccattagttagccttaaggatttacctactctagcttctgtttcacaatgccgagatttcgggtctctcgagctttttacgagtctccccgatcagctcgggaatagcggtctgacaataaccgaatattagcctgatgcaaggccccgtggtgtaccttcggccacggaattcatattccgccatgccgtgcatccgattggttgaaaaatctatagaaagagattgggcatcaagttatattatcaagtcaattgcagatgatcaaagctgacgacagtgatatacatatgattcgcaattcattctctagtggcatccagcattccaaacataatcccgagggtagatcttgtatcttgcaattgattgcggtattgtcatttttagatagaagcgaatagaggatctcaagggaattactatctgtaaaccttggtggctgagaagaaattgctagaaagaagtataactatgtcgacatgactatatacatacctgtcgttcttgaaacacaaagtagatccactatttaagagtatacgcaagcttccgcaagggattccgatcaccacgatgtcatgaaatatcgatgtgcaggaggtacattgtagattgtacgttgttgacatacatcgatcatcgtctataccttgtagtacaaagtaggtgcctgaccttatctttgtggataaaatcgaaaactccaccaactccactccatctgatcacaaatttagccgtttttcgccttcttctgaataatttttcttctcttcttcaacgcctcagatcactcatagtaaccttagaactatcgtgtctctgacaagttgaaaatgtcaaatgaaccgcatgcgggtgcagacccccaggccagcgggtctcaggatctaaatattacccctccacaaggccaagatggaggagactcagcgccagcatccagccggtcctcaatgtcctacacaaggacatactcaacaccggcaaccggggcacaaacccccgatccactgatgggccacaagatcgtggacaaaatcgccctccaagacctctccatcaatgatctcaaccgtgaaatcgagagctatgccctcgatacaacaggcaacatgaagaacagaaaacttccagactcggtatcccgacctcatcccggcaccgatgaagaatcgggatctccgattcgcagcaagcaaggcatcccacccgagctttcaagcttcacagccgaactggtcttgatcttcgtctgctcagtaggtctaatgctcttctccttcctactgggcgacgtgctcgcaccgcaagaacaaatcaaagcagccctgggcatcaccaacgccgagcttccctgggtcatcggcgccttcaacacagccaacggcctatcggtaatcatctccggctcgctaacagacctactgccaccaaagctcctgatggttggagccttcgcctggctcgccatatggaacctaatcggcgcattcagcctccagccctctcgctgcgtcctattcttcatcgtgcgcgccatgcagggtctctccatcggcgtcctcgtctcaggaagcatgagcatcctcggccgcgtctatacaccgggtattcgcaaaaaccgcgtgttctccgcaatggccgctaccgccccgctcgggttctccctcggcgcaatccaaggcggtgccttgtcccgtcacctcccgtggatctttggctcaaacgccattctctccgtgatcttgtgtgtggctgcctggctcgcgattccacccctccgacccatggcagatgcatccggtaaggaagccccgtcgatcaagcaattcgactacatcggcggcttctgcgcggccggcggctgcgtgtgccttttgttcgggctaacgcagggccccgtggcatcctggtccccttacacgtacgttttaatcatcgtgagctttgggctcttcatcgggctcttcttcgccgagcgcaatgcagttcgccctctcatccctaaccgcctctggcgcacaccgggcttcactccgttgatgatcgcgtacttccttggcttcgggtccttcttcggctgctggcagttctacgcaattcagttctggctgcgtatccaacacgctagtccgattattaccgcgctgtataatattcccaacgcgctagtcggtgtcctggcgacattgattgtcgcccgcactttacacctcgttccgggtcactatatttacgcggtatctatgctggccttcacgttaggaccggcgtttttcctgccgcagactgccaacaccagttactgggcgctttcgttcccgggtcttattctggtaacattcgggccggatcttgctttcgcggcggcttcaatcttcattactagtaatgttgaacggtcctatcaggggagtgcgggtgctttgttggtcaccaaccagaacctctcatcagcgattctgactagtgttgccgatgctattgggacccgtgttgataaaggcccgtctggggaaattggtcttgatgggctgcgtgctatttggtggtttggcctcgcggcgcagttgctcgctgcgttgatcacgattgtttgggtccgaattccgaaggaggaggagaaggagcacgttacttgatttaaatattaccttgtcattagatttagaaatacatgtcttagatcatgccttagatattaccccttccgctctaaaagccatatctaattttgcagtaataaaatcgtttcatcatactactagagctcgatatatgcaaataataaaaagaaagacttgtcatttagccacccgtcccctaaatatatacatcaaaatactgagcccaaaaagacatgttgccgccaaagtatgccgcctaaatgagatcgtaaatattaaacaaaaataaagaatacatgtatcgaaactaaagagaacaaaaaagcatcaagcatccataaccaccttatgctcactggtactattcttcggagttgcctcctgcataatactcatgctcatctcggtggtaacctcaataccgccgagcgaaatgtgactggagtggtcaccaagcttaacattgatcgaatacatctcatagtccttatcgtggttataagtaaacatctgagtatggtgtgtcagagcgcgagttcccgtgaggtttgtccctgcggatttattggcatagggattcgagctacctccggaaagcagtttagggaagatgcggctgatgataggtcgcaagaacgggagacaggcgcacatgatagcgacgttgcattctgcggcggtccaataggcggctgcaacgttgctgtctgttcggtaggttagcttgaggagtcgattggagaggacaagaagatgacatacaggaagtatcggggctttttgctacttcacgtaaactagataggcggagaatgctggtgactacaaccaagagacccatggcaaagacacccattaaggcgatcttctgcatgcggggcagctgtagcttggaaagtagcggcatcggcaagactagtagtgctatatcggttgcaatattcattgaagcattgaagaaccagacagcctcgaagctgagacagctgcctggcaagtccttgttccaaaattttgccacagggacacagtccacgaagccgctcacaatggcccacgacgagtaggcagccacgattgctatcatgacataacaggcgaggcgaaatcttttggcagggaagatgcgtagatattggaggagaatggagaatttgctgaatgccaagctggcattgtacatagggattgcagcccacaaacactgagaagaaagtcaggttatttacactaacaaagaaaagaagtgaagaataaagtgtaccttgagttgttgctgtaagacatgactggaaagtagtgccgagtggacacccattttataatgtagttctatcatctatattagtggggtggtttctgaattcacctctgcactatgaacgtacgggcagcgacgagtgcaagatagataatggaaaatgtctaaacatatgttttattagcgagctgatcatctaactccagacgtggcttcaagaggcataccaaagagaccagaatagcccaatcttcacggccagcaattttcatcaatccaaatcgtgcatacaatcgcattccgacaatgagaattgaaatggcggttaggactgccgttaccaccaatgcccgtcggccatgagaggccccaccatcatcatcctctcgaggaagcaatgtgtgaattgaaccgtgcatattaaatatcgaagtcaaggaccaaatatagcgagagtagttaaaatgagctcgtggctatttgcagttgggtcaattgatcatgtccagcaagcgtagtggcctcggatagatgcagctcactgcactaaaattgggatcgagagtgctagtaacgtgggtgatattcgaatagaaaacaatccttctcggagacagtcgcagagacagggagcagggacaaactcctttgagtatgttatccaagccaatcattgtctgcacaaagcgcggagaagcatttgcacgtggcattgcccaatctgggtagtcgattcataggaaacacccctatttcgagtagtttctctcaatagcgccacaccagccggcggtcctatgttccaatctaggtcgctagaaagctttagtcgatgaagcgataggtccagtatatgccgtgtaatgtgggggcttgtactctgcagacaaaacttccacacaagcgtttggcgcgggaacctggtcgccgaatctccgccataggcagggattcccgccgaacaatgttgcgaggggctcactgaaaggggtcaggattgacatgtgtctgctaattccgttataggaaaccccagctatcatttcaagtttcctcgttgggaatggaggttgagaacggggctctgtgtcggtacataggacccacttgggtgggtatacggtgcagatgtcactttcctgaagaaaatttagtgcaaggtggggttgcattggcgtagtgccgtcattctaatgatattgtgttgcaagccggatgacccgaggtcaggactggcagtgttgtattgcataggcatgaattgttgagacattctacgtgtattgcgagagccaaagtagagcatatgcattagaaacaattcatgatcgacattggacaaaggacctcggtacggagaaaaagggaaagaaagggagaagtaggatcgacagaggatctcccgcgccacttcctaatccggttagggtatgtcccctttattccaaggtcgctcctttattttgatctccagaactattcaagtcttgtacttcagtattcagtactccgtactccgtactccgtattctatactggaataattcatgatgttctgtttgtccattcactcgactgtttcctttgccatgagagatcatattacaagtcagccgtcagacatccatagatggcctcgggagtatcttcttttgcagtccctgagttgtgaaacaaagcaatgatcgccacagttcaataatgaagtggatgacctccacgcaaaagggtcatgaagcgaaccagcgcacagaacttgtcatgactttgcaaagtgactggctacggagtattatgtactgctagacgctgtccacagctgcgtcacttgcatattcgctgccttgggatattttgggatgcacggacaagctgattgaccaagaaagactacggattttgttcttgggtgcagtcccccggatacaatatacgattctggcgtcaacccatagttagaatatagaatatggccggtggaaaagttgtgaaacattcaaattgacgtttccgtatataccatgtgattcaatagaacggtaagcatctgaaggtggctagtcgagatctaccttatagattcattgtatcacaatcacttccacttcggaggctgaaaatcccagactggaacagtatttggccccgtctattgtggccatatatgtcatatccaatataccctctcaatctattctccagacagctcaacaacgacctccccttccctcccaagctccgcattaacagccgtccccaaattcgcactgagctcgcggatcttatgactaacccatccatgatccgcatctccagaatccaacaaacgagcctgaaaccgctcaactcgcgtagggaagatctccaacttctccaacccaagcccaccaccacccttctcccgaacaacaaccctccacaaagccccaagatcattcctatactccgtattcaaagcataatcatccacaaagtccccacaaccatagataataagcttcccacgataaacctccacgccctgaacatgatgcgacgaatgcccatgcacaatatcaaccccacactcatcaaccaagaaatgcgcaagcgacgtaacccgcgcatccggatgccaagcgtaattcggcccccagtgcaccgaaaacaccttcaacgcaggcttcgtcgcctcagcgccaacgagcatttcccgcagccgagcgcgcgtgtcgcgcgtgtagtcgaacagattgaatcccggcacactgatccatgcgtgcgggtggtcggtggctgagtatatatgcactgtgtggcggtgttggctttgttctatgggctctgaggccctgggcaaatatagcactgcgggcttgcgcgcgccatcggctgtttcgcccgcgcctgcgtgggcgatattcgccgattgtagtgtttgtaaagtctcggtgagacccgatatgccgaagtcgagggtgtggttattggcgagactggcgtagtcgacaccgccggcgtgtaggatgggacctaggtttgctgggtgcatgcggtagttgaatgccttgttgggccatggggttggggctgttgtcacggctgtttcgaggttgatgcatgctagggtcgaggagtggaggatgcggagggctgtgccccatggcgaagtgggtgtgtagtttccttttgagaaaaaggttgggtgggcttctatgaaagttttgacgacgcgttcgtcctgctcgttggtgacgtgctttggcattagttggtcgatcaggcggccgagcattacgtcgcctgtgaaggtaagagtgaaggattttggagtggacatagtagagatggtcagtttgaagaattgaaattggaattgtttagagcgtattggatatatttccaattgagttgatcgaggttggatttggacattggatcattatgacatcggtcttcatgaagttcaagcatctacttgtaggcatttgaggaacacgtggaaatagatatcgttttcatattaaaatacaattcatttgacacacttttttaagaataataacacagccagggataggatatcccagtaacgtgagtggtatctttgtgcgccgttgatctcacgagaaacaccgattggcaaaacattatctgaatatcattattttcatcattgcttgggcggcgtcgaatctatcgtctcatctctgccagctcgcgctcctttgctctgagcatctcgcgcatctgctcagcttcgcgttcaagtcgggcacggcgatcaaccgagtctccaagagatgcaattccaggcaaaggctgtgacgggtgaggtgaaggggagatagaatggtgaataggaggtggacgtcccagattggtatccgagcgaggctcgccccgaacatctgattggttcagaatagacgagatagagctgagacgaccggggggagtaggattggccgaagacataatcggaggcagttggttggatcctgcttccaatgtagatggagcgggtagagcctctgtcgcagtctcggccaatgttcgtttcttggggaggttgatggaatttggagaggcggaccgtcgcccgtactgaggcgcgggcgaatgccccagccgctccacccccaaaggtttaggtaggccgtgagagatggagagaccatgtgcaagaggcacggatgaaacattgtaaccagtgaaatcaaccggcggtggcgcaaaatgtaaaactcgaggtgcgtcttcggattttccaggcatcatcgggtagtgatccgtaggctcgctgctcatatatcgatagtgatcatcatggccatgcaccagggcggcaggcgatgcctccggggatgccgatgagccattggaggaaagggtagcagcggtgggagactgatctcgtagggcgggaacaacccgtttgcgacgtttgatgatggactttttcatgttggtggggcgatagcatccatggagcttataatacaatcctgtcttgtgttagagaaatcagatcatcaagtctatatggaaactcaaacttaccacaagcgttgcaaatagggtggccctgttcatcgcgcctccacagaggagtcacagtcgtgccgcaattttgacaagcaaccaatgtattagtgccatcggcagaagcaggggccttcaccggtggctcctcttgcgtcacaggctcaaggtcttgtgctgggttacggccccacgaagattggatggcagccgctccccggggggcggacttgtatatccggttgttgtatgccgggcatccatcgcatccttctgcgccaccggtgccattacaactcccaccgccagggcatgaccccttgcaacctccttccgaggaaccgccacagtgagaccgcataggaggcggtggcttctcggcaccttctgattgcatccgatttcgtttcgtggggcgagcgacattgcgagctttgaggtagagaccgcaggcgttgcagatcatggctcccgtgggagaacgacgccaaagaggagtactttttgtgccgcaattactgaataaaagagacggggtcagtctttatagcctaagtatcaaccgaggcccagtcgaaactcacctgcatgaatgccctagaaaagttgtgtctttttggctgccgggggatgttttctcgctcgggatttcgttgtgtccaatccattgatttgatccagattgacccgatccttgccccatgccatcgtcccggtagtgatctgctagatgttcacgacctgcttgtgctgaggagatcaactgctgcgcagcatccaaatcctccgcggacggttgtcgcattggaacgtcctgattccggggtaaagagtgaagcgcttccatttgtgggatggacgctaacattacaggatgtgatccgggccaggaatccttcggccgtgagtctcagtacgggatgatcgaatatgaacgaaacgacaaaaacgaagggggtgataatcctaggatgtgagggcgatgtcgcaccacagtcgagagcagaatgcaccgtatcactcaaaaaccaaatgtcggtcaagctgacgggttggagaaatatgggaaagtcagtccagcaggcagatatgcagccacgatgctgcaggctcggggagtcgcagggcggacgatgactcgggatcgcggtcgaaaagaagtgaagtcggatgctgccaacctaggagtcaggaaatcgagtggtccgagtagatgaaagtagttgacccgccaccaaaaggtatggagcggcctgtatggaatagtggcgacccgacggcgtggaacagtcaggtgatggtgattgcgacaattgacagcacaccacagggcctggtctgactggcaggcgatcgtgggggacggtttcgttcggggacggtggcccgatgcaaaaggacgattagcgaggcagggattggctaaaagggtagggagctgcaagatggtgatcactccgcgtcactgcaagcgggcacacaagatgtgatgggagcgataaggggaagttcgagggatggaagagatgtcaaagataagtgggaaaccctaaaaaagattaaaaggaaaaggagagaacccgagaacaaagaggcgagaccgaattgcttatcgccgaggaaagggagggttggggtttatcgatctaaggtggaaggggaggatctacggcatatcaatctatcacactttatctatcgtttgccgaggatcgcatcaatctcatctaatcatgttctattttacggcgtacttttttgcctaggggattcgctatcctaatccccaaggaaatctctggcggttctgcatgattctatgttcccccaggattgcatgttgactccaccgtatggcctgatgaagtttagttggaaagtgaaaaattacagtggaaaaggtgggaaacggtggtaaaagtggaaagagtgggaattacacatccccaagtgaggttgcggtggagccctggtaggcaatcagatatgtagcgcctcggattggtcgcaagcggctgactaatcttgtcatcaacactctagcgattccgattggccgctcggagatggaacaagccgaagcgatgtggccacgctggactttgggatacggagtaaatctaggaccgtccgcggacgacaaaagtacaggcttggccccgaccacggagtaatacatcatcgtctccgtgtggtcggtacatatgccagtctccacagccaagaagtccctgcactagttcctttatttatcagatgatctctcaccggcttctccaataagaactcgatcaatcattactccgtagagcatgccaatgttgctagataatgctagcccacgtccaaatatagtacacgtgtctctgtccctttacgctggtatcaacaaaaatatccgagatccagcagaatcgcccattctcctcacattctctgctttataatgacatccttcgatcaaatcgagatcaaggacatcccaaggtcattgcgctcatcgaacatcgcataccacatgctggaggaactgccggaatagacagtatcccaccacagtgtcaatgcgacagaagatcgtcatcgccgcctactcgggcggcaatttagacctgctcggcaccccagccctggtcagattcgcgcatgttcgaaggaggctcgatagatggaatgaactccaacgcgacgtatccgagaccgatgaaggcaatcaccgaaccatcaatgatgcgcaacacgttgtcgtgcagcaggatggaaccgataaagatgtagactgttggcgcaagtgattagccaccgaattccccctcggatctgcagacatgcaaaggtctaacttacagacaccacggccgaggaatgagaagaggaacgacgcataacggtacgcgtagtccggaacgtgagggaggaactccagtccaccaacgactaggataatgttagccttgactattgacgttgcgagttcggattatcgtggggacctaccgagaccgaagacaactgcatacgcgcccaggatgaatgaactccaggtgccggtgaagaagttactgatgccaccgagcaccataaacacacccacggcgatgttgacaatacggctgcataggatcagtactggcgcaaatctatcatctctcacgaagagccaacatacaagatgtttgtgaaatccattgtgtgcttcgttgaagggtttatgagatgaaagtgatccttgggtgctcgcgaatcagtaatgcggagggcgggtcgttaggctgccaagtttcgacaaaggaagattcggtgtcgggtgactaaatcgggtcttcaaaggtgccaagttagctttgacgcgaatatagataccgcttggtctcgccaatcgctcaagtgatgacggaggtcagattcgctagagttcggaactcagtttgctggtttggtaacaaagggaaacgcacctttgagatggaagagtgggtctgagggaagctataataagcaacacacgtttgatcaaaaggctggctagtgtttgaatgaagcagaacaggggaaagtggaaatgagggcgtcgacagctgctgcgctgtcgcaagcagcgggtctgccaaggccactggtagctcacgtgatctggcaccggccagtgcgggtgctatgctgtattcggtatagtgtttccttgatttcttgacatcgggcacttaggtatcattgatacctcgaacggtggatgcgacttgatagtaaacgttaagattagtttataggatactggaaccccgagctagagaagtgaaatagggaagatccagagataaaatgcggcaggaagagagagagaaaacgacggagagttgaagaactaggaaaaccaccatatctactccctatttttcactagttagaacaagatggccaaaatgacattgcctttttatgttgcgagctcctgacaaatgtctagtaaagagatatcattatcttagattaagttctggaatacttgttcgtgagggaaagaccgatgattttgccattcttctcgttaagacccatggttatagtatgcattgtcaaagttcctcaatcacatcctgccttttctccagtcggacttcagagagaccattggcgaagcgactcatacgcacggggtcccgctctagcacattgtatattttacccaaatcagttccaatcccgatctcagcagcagtcttcaagctccgcgaatcgagacaaggagcaatgcttggccatatgccttgaacattgttgaaaaatacctcgactgccaaatcacccatgcccctgacctccttcagcaatattctagctttgtcgattttgccagctgcctgcttgaggagattatttaaatccccatctgtactcatacgacgtcagactccacttccacgtgcagtataactataacatcgcaaattcacccgcgcagatagaagcgaggacgtaccgtatctctcaacaaccagtttggcgagctcgccgagattggtggcgcactgctctcgataccggttgtaacttccttcttgcaggacctttgttcgatcttcccatgtgcttttagaaagtacgtcgatgtcatggtagtcggcttcaattagctttttgatcgttctctgtgtcaactcgtgcgagatgggccttgctttgatcatggcgtccagcaccatcgccaacactacctcggggctagcattttgtgggtcggcaagtactgtgccatgtagaggaggtacaccgaactcgttcaggattttgttgattttatctgctgcttccttggtcgtaggcgctgacattgtggagaaattgatgaaacgattataatggagttgaattattctcgggttgagtctcaaatcgagtgtttcaacaatcatcaattgacgtcatgatggcatgtacgggccaaccagactttgcaaaattacatgccgagactaaatttccgaacactgtacaacaattgatctatacaacgcgtttcctcacagcttagagcgagatatgttctgcaggacctccttgaccagagccacggcggtatatgcacagccgaaggaggcctggtagccaaatcctccatgaccatagttgtgaacgatggccacaccgtcaaccttgtctttttcaatgcgagtgccaccttctctcagcgggcgcaggccaacgccgtggcgaatgatatccaacccctcaattccctgccccttctcaacgagatcggggcagatgtcgacgcaacgcttcatgatgcgattggcaaggttcatatctgggattccattccagttgtgcttctgataagagccaccgaggatcgtgccgccacctagaagcaataagccaacggtcgaacaataaaaccagcacatgagaacttacctgcagcacgagtcataatgtacaacgcctcatcttccccgtcgtcggtcccggatatcgacatcatggggccggggtcgttgcggactacgacgatctggccacgagcgggatacatcttgtcgtcgagaacaccaccgagagtctttgccgacaggccggtgcagttgaccaccacgtcagctttctgtccggtgtggtgggcattggctgcgtcggcgatatgcttaaagacagctcgtttgaacacggcgccgttcttgacgcactgaccgaccaaccacggcaggtagacggcggtgttgatacagacagatacgaattcctggccgttgtcaattccgggggccaattgatcagaagggaggtttttgaactatcatcatcatgtcagtctgcaggcagtctatggcaccatctcacggttcaaacatacatcaagcacgacatctttataccacgggtttggctgggtcaattccgagaaccaccttccggtgtctgtttcttgatccttcttccggttgtagatcaaggtgtctacattctgttagagggtctgcggatgctgatcaagttctgggccggtatcatacctcggaagtggatgccagcttctgggtacttctcggtgatttccttcaatgctggccaggtatcgcgctcccatttctgatgagcacttccctcttttcccaccctataaaacatccacttgatcagaactttatcgcgcagccggtttcagtcgatcatacggcatatagttggcaccggcccatggggacgcatattcaatatcatagtctccaggcatatgcttcgccaaaacagtaatcttgttggcggggtcttgcgacagcagatatgcggtggtcaaaccagacacaccggcgctgttacatccgttagtagaggctcgaagtgcggtccagtagaattggagctagagaacttgggaggttgatcttaccccagaaccacaatgttgttagtcataatggacaatttgacctggaagttcttaggaaaacacagcacaggtgactcgaaaggggcccgctgtccttaaatgtgggctaagacgagcggggtgaggggagagatagctggttgtcccattcagctgataagggttgccctccagggcaggtggacacccgtggaccgggtggtctgattacctcactttgtacttggccaattgcgggaagtgctaccggggcggtgtaagctttatccaatcacatgccaccaaaaaaaaaagaaataaacggcctgggaactttcagtggagacacggcggtcgaagatttaaaagacaactccgcacttatgcggaggtgatgtgctcctggtcaaagcattggaagcattgttgcaacggaaatctaaagctttgatcaatctcaatgcttttgtttctgaactctcttagacccttgatttagtcttaaggtatcagtgacttcgcctggaccccagcaaggagctccgtaaagtcccgctccatcactccggactccactccgatcgatcacatttgatcctagggctatatgccagggctcttcaattacctcaattcgtggtcagtgttctcgtaaatgactctaatttgagatattttcgagcaggaacacctggaagaagctttgttctgctaaatatagaatcgaatgccctgaagccttgctatacaaagaaacccgagcgatgtcatagtgggcaaacgcctagttgtggccaatcactgagcattagggctcaccgccccgcccccaacactgaaatgggcatcgaagggccgaacaatttcctttttcaaaccacccgcagggcccgaattcactcggcgggctccttttgtttgccattcttagatcaataacttcaatttttcaattttctccatcttctctcccttcttgatcggtctatttgtttagccattcctctatactcccataaatgccgacccttattcgagtgttccctccaatatgtcactcgtcactaatggtggcagaatcgtgcccatacttacgggctctgattctcgcgatcccaccctcgaggtgtctgcgttgttagacggatctcttcctcccatccctattactccaattccttccacaccgaccacgccccgcctgtcgcaggaccaacaagcttgcaaacaggtcaagcccgtgcaccatgcgagcttagaaatgccctctctccaacaaaggggcctttatgcaatccccacggagggagatggtaagccaattacacttgttgcatgatttttgagctctatagtggtctttggaagctgcaccgcgttgttttacttattctgacgcgtccaatcgcaggcaattgtctctattactccctctccgaccaactgtatggcgacacccaccatgcagacgaaattcgacagcttcttgccagtcacatggcttccaataaagattacttcatgcaatttgtcgttgctgaaggtggggagcgccgccgccctaaacgtgcggctgcctctgcgtatgctactcgatctgccgatgtctctgctccctccgaggaggacatggaacggcgattccaaggcatgattgctaccacccgtaagaacggggagtggggtagctccgagcatctccaggcattttgtcaggtcttcaaggtcgacttgaatgtatacaccatggatggtgtttcggtgttccaggatgtcaatgccctcccaaatcaatatcgggatgttctgcacgtagccttccatgtaagtgccttgctgttgtacatgtcatcgagcgtcgtacaatgtcatcaagccactaacgagcacaggacttcaagcactactcttcagtgcggggtatcgagggcaagcatgaagggcttcttaccaagctaaaccctctccagcccttcgaggagggaatcaagtccgaggtcgttccagactccaaagccgacttcgatcatgaacaattctcttcacaggaggaaaaagccgtcgatagttatacaaccaacgatgctagccttgctgttgacctatatcctccttgggatatcaaaactatccaagaaggattgggtggccgatatgaccgggagaccattgtgaacatgctccaaagatgtcgtggtgacattgaccgtgcattcgccgcgctcctagacgagaagacagacgtcctatctgataggaaagctgcccccggaattcctatcaaaccaagcttgcaggcctcacgctcttcttctccattcagcacgggtagcaagcggtccgcagaagacagcgacgactctgaagatcctcgtcccgcgcgacgcacccgacctaagaaacggctcctttccaatcttaccttaggcgttggtatctcattcagggatgattatgacgaggttgtctccttgaatcttcgagtaagttctccaaccaaaggtttccatatgggatatttactgacgtttcgttcaatagatgaactccgacactgaagacagtcaggccacagaccgcactcccccgggtaacactaacccggaacaaccggacatgggcgagaagaaatgtcgtcgcagtagacgactttcccgcccgcgctcgagctgatttatttgtttcttgccattctctggctagacctttgagcatctttagcgctttctcttgcatcgaaaaaaaaaaaacggcgttagtgatgaagcgattagtttcttgggtttgcatattgcatagccctgcggggctcgcggcctatgggcttgcggaaggaggcgttttgtctgattatgaattccatggggtttttgcctggggcactcctcaacgatcttatttataacgataccagggtttctttctccccacttcttttagagtccttagctttagctctttttcggctctcttgtttcagtctgggtattggcccatatccagcgtcggtggcgagctgttttcacagctctgtttggtggcttggattattatacagctattcaatgtcacacccactttctggctggactctgtcggtcgtactcattccctaggcccttcctagtgatatagtgaatataggtgtaactcatactttggataggttttactccatgtaacagaacggacctaattatcattctaaaataccacttcaccgcctatcactatgtacatgtatgtatgtaggtattgcgaggccgtcgtctctaatgacattcaatttactatcctagtgcgtgtcatgtacatgaagatatatttatttgatactagtctaaaagaatgtctaaaagaacaccaagcaggattcggcagagagccgggcagaagccaaaacaaatctaatgcagttcgcttgtgttgcatgaaatatgtatgcgtgcctttagtcctccagtaggaacttcaggaacgccaccccaatggcgacaccatcatgttcaatattagctctgctcaaagcatcttgagcttgttcctccttgaaaacaccgccctcggcccgagtccggataatctccgtgatgatgtctcccgtgaattcaggatggccctgaagagtgataaagtggcgcggcacatacataccctgcactgcgcagcgcggggatgagcccagaggaaccacgttcgggggataattaaatacaatatcctgatgcatttgctggatgcgctatttgcgagaaggaaaggtcaggtcaagtgtctgcatatggactcgggtgcatgggtatgtatgtatgaagccttgtgttacacatgacgcaggcgcagggtactcacgatcttatctctcccaaacagctcctttcccttatcggtcaaatccatatcacacacggcaatctcccaaccttggtcgcttcgtccgaccttgctgtttaatgcgcggccaacgatttgatgtccgaagcagatcccgagtaggcggacccgatcctgcgagagaacttgttgagtgaattcgacgagacgattgatccagggaatgtcttcgaacgagttgtgttctggcttatggttactgtgattagtgtatgcattcaatgctctgggcctaccgtgtcaacacgcacttgatcctgttagaagcacggcatccacgtcttccagcttcgggtatttgtcgtcgttgactacatcccaagctgtaatttccagtcctgtttctgggtcgagtctttctggctcgttcaaggcgttgacactagctttgaggagcgcgcggaataccccgccatatccattatagcggcggttgatgctgtcaaggggagtgtcgcattccaagacggctatgcggagcgggggttgcattgttctggatgatttgaagctgcaaacaatgtgatacagttataaaacaaaaagatctagttactccgtagcaattggagaaagacgagacaatattcccttatcttatcggaccccgagatcggaccctgctgaccaaccacgctattcccgatgtggcaaacatctacaaagtatgagccttcagcggatcgcccttttttacccctcggcaatgcaattgatgctgtgttgcatcaaataaaaggatcttgcagccctagcgttggtataaatatcatatccccatacgcccggattttctctcttttttcccttatttttgtgtcaccactgctttcgaaacccatgagccgctgttgatggcgttcgctgtaattacattgcgtgcttgcagaatcttcgtcctcatgaaataacattttcatacatttgtcttcataaattttttttaaaaaatgcccagtgacaacgaggggcaatcatgtccctctgaagccacccctctcctgcgcaagaattcggtccatcggaaaacgagttatcacgatgtctcgtattctgcaacggatgttgaatcagtctgctcatacagagatacagaagaagaagaagccaacgttcgctgtatatccagtgcaagctctgccgaaggactcgatgttggtccggcttctggggctggctcgcccaaccaacagccgaacatctcaacccaagatggggaggattacgcctcgagattcattgatatatcaccgacaaggttttggatcatctttagtggtatcatgatgggctacctgatcggcttctttgactcaacgctcatggcttcaagccatccagtcatcacctcctacttcgaagcagccaactcagcctcctggttatcgacggcctttttgttgacatcgaccgcatttatgccgctcttgggacgcatctctgacgcatttggccgaaagcctgtctatctcttctctatcgccatgttcttcctcacgacagcaggctgtggcttagcgcaaagtatcggcagtttcatcgctgcccgcgcgctgtgtgggcttggtgcgggtggtatcttctccattggtcagatcatctctagtgacttggtacgtctcgagtatcgcggtgtctaccaatcatacatcaatctgtgtctcggcatcggcggtagcctcggccttgcctttgggggttacctgtgtgatcatatcggctggcggggtgcgtttctcatccaactgcctttcatcttcgtttactttatagcagccgcttggacagtcccggcagatctcggcattaaacaaactggaatggagcgcatgaaagtctggcagttagtccggagcatcgatatactgggatcaatcatcttgattatatgtgtgactctgttgatcatgggtctgaacttcggaggcaatgtctatccttggagccatccactcattatcatctccctggtgtcatcgttagtcctagcggttatcttggtacgttacgagctgcacgttccacgacccgtgctaccaattgagctcatggcaacggatcctcgagctagtatcatctttggcaatttctttgcctccatgtctgtacacaccatgctgttcaatgctccgctgtattttcaggcggtgaagctgaccagcccaactgcttctgggctacgccttgtggcctcctccatagctgtgactatctctagcgtgagcaccgggttcatgattaactggaccagacgtctcaaaccttatgtcatcatcggtgtatgttgtatggtgataggtggatgtgcagctgcatccatggggattgacacctctcaaccactctccatgatctgcatctcattctccagtctaggtcagggcttcgcatttcccagcttgatggtatctatcctcgccacgagcgagaaacaagatcaggccgtcgcaacaaccactctggggctgtggagaaaccttggcgccgtgatgggtgtggctgtcagcagctggatctttcagaacagtctcatataccagcttaacaaaaatgttactggttttgagaagaaccatatcattgcacttgtccgcaaatctgttgatactatcgctcacttggatccaatccatcggcgagaaggtgtgtctcatccccttggaatgccgatttgatttgctaataaccacccagtcactctatcatattccgccgctcttcaactgaccttcatatctgccgccttatgggcagtcattgtgttaatattgttgggtcgagtccgactaccgcggttggggagaaaggcctagacggtgtccctgagatggttcggtattttgacaccgaagattgcatattggcttcaaatctcagcatgtttcggataaaatgtgttataagtattttaattctgactgtatttgtttgagttgatataaattatgtatgcgtatactccgtactcaaccgtctccgtatatcggcgatcttggcaatgcgacccacctttttttcttgacttctttaacttgacatccacttctccgcaacttgagaagtctgtgtggctacataagcaaggggccagtgagtatttcatacggtactttcacacgaggaccataatcctcagctgacccttttttgccccaggattattcgccgatcccttcgttcctgcccctcctgtgccgccggctggtagattcaaatctacacctgaatatcagatcgaaatcctattctctctatctgaacctcctcttgccagtcaacaacgaatatggccatctggttagaacctacaacggcatattgtgtattcgggaagcctctatcagttgggactccagttggcgccggggactagaaacatagttgcgctcacaagagcaagagctatcgcaatcagcaatttatcaaggaaatatgaacctccgaaaagaagcggagacgcagccgcagtcgcccagcgccagcacgaggacatccactccaaaaagccaggcaagcgattcacaaagcacaccccgccgctccagtcgcaagaaatcctcagatgccccagataccaaagctaggagggtacgcacaggctgcctcacttgtcgccaaagacatttgaagtgcgacgaagccgtgggacgatgtctcaattgtcgcaaatcggatcgcatctgtcgacgtggtgtccgtctcaatttcattgatactcaaactgtggcgcctccacacatcatcgctcggccccacggatcgaaggtgacatttcgagatgactcgcgtttgatcgcgtctctgtatgtgggaggtttcgagatatacccacccgttcagccagagagtcctgttcaagagaaccaagattcgccacatgactttgactttataggggatgatgatttgacaaatctttttcaatcaatggcacattcgtttgacccgctgagctttgatatcccacacccaaatgcaacggactttgttggaagtgatacttggcaccagtctcacttggtaccaggagatgaacttcttccgcacgggacgtcaaattttgcgcgaaaactggctgggaaacatgaatattatccttttctcactgacccagagcaagtatctcttctcagaacattcatggaagaggtcggtccccgcctggatataatggatgaaatgaaccatgtgagtaaaattccccacattacattcttacaatctgctcacaaagcgcagttttcccagattcttccgggttttgccattagtgagcccatattgctcaaggcatttcttgcgtgtggtgcgagacatctttctattgtagacccttcttacggggatgaaaaagcgacacattattatgacgcagctactcgggatcttctgaatgcggtacatgatcctaaccgtgactctgtactatgcgcaacagcggcccttgccctcggcttctccgaaaccatgcaaagccaatcaagccacagtggaaatcacagcgcaggctcccgggctttgatcagagaatgtggctggaatgccaaaacccctgggctgggtggagcatgtttcaggatcagcgtcggcgcagaactcctgaactgtatgcgatataattggacattgtcttgggatccaaatacatggggaatcgatatggacatggatcatccacaagccgcaaatggaggcaatcaagatctatggcatcatcggatactttatattttcgcgagagtcatgaccttcaaagcatcttcgcgcccatctcacggtgtggcgcgggctatccagctcaacgatcatgaatggatcactcacaacaggtggtgtgaccaatgggcgaaatccattcctagatcccttgtacctcttggtcatttgcagccatggcaaacaagttccaaatcggtctttcctgaagtttggtatgtcctcaattctcgcattcaacctgttcatcaactaatattcgtaggcttgtcaaccgatctgccattgtttctcaattattctaccacgcgactcgtattatgctggccaaaacacacccttttcagtcagagttcgatgaggatatgcgaaagatgcaacgcagccatgcgcacgaaatttgtggcattattgcctacaccacagatcggttagtacaaatcatgaccaaaattttagaaatatctgtctaaccagttgagcagaagtgtggcggatatatccctgtactttcttgtactcgctgcagagtgcttagaaacacgagaagcccaagaggaggtactcggcatctttgataccatcacgaaagtgacttgcagcagtgctgaaccaatcaaaaacgatctcaaacaaatttggagctgggccgaagctcacccacacatggtgacgccagcccagatgcacaaccacttctatgaattagacccatccctatcagtctccaatcacccggactcatctccaagtctacacaatcccttgttgactaggggtgacttctcattggagagccacccgtatcaaggatactatgtgccaccacatcaccaccatgcactcaatcagtatcactatgggtcatttgatctgatttgatgcttcaaacactttgacgaatcatgaattttattgtccaacttcacattcatactgcttatacccctgtgaatacaataacgctaggtttcgctaaaaaaaaagctccatggcagggctgttcccagctactttgggacattcactgtctattccagtattgcatgactaatatgaagcgttgtagacgattaaattagcatgtatctcagttgttgaatttagaaatggccaggaaggtggggtttaagaactgttaccatgtatagatatatatctgagatgtgatttattaacacaacaacttagcgactagagagaacgatgttggagaattatgacaccagctagctttgactgtggtcttgctgttgagcgcaatacttgccacaacagtcgctacctcgtggcttatgacttcatatttcatcttgctcggttcttaaataaacacccgatcataacgacgtatggttgccacaaactttgaattacgtactatatacgttgaacaattgcgcaaaaagtagcatggccaagctctggtctaaacgacaggttcgggactcttccgacaactggtatatttgaaggacgcctcatcctccttttcgtgaatattgcgttgaaaagtttgaaaattgcacacacacaacttactcagattacaatatgtcgaaccctgccgaaagaattgcagaagataattatgaaagagacaatgacccttcgcccgtgaccggaaccttcgcagatgactcttatgtcgaagagaccgacccaagcttgagagcacaagtccccgtccagggagatgaacagccatttgatgacccaatacaacctccttattcaaattctgatcagcagcttggtaagtccatattgtatttcttggcaaatatccaagtatcagcgaactaatagcgtctatagagagagacgagaacgaagcaatcgataactctaatgtcctaaaaggagaccgtctccgtcatgcaaagcctagaacctcgaacaggtacaatgaggggccaggtgaacatgatctgccggctgagccttaagtgatttgcaattgttcttgatctatgaatttgtgcggatatcgaaacgcagtaatacaaaccagttgaatttcctcctgttaaagtatctaaaatctcgatgaaagtgtactctactatgctctgtaggtatgtagatatcaacaacattggaaatcgtccaagcgctaatcttcagggtgttggggttgataagacgtgctccagtcagaaagaagtggtgcgattgaagttatatggaggcttactacagcctggacctcgggagattgtgtatccctcaactatcgtataggaaccgagttaatctgatcggccccgggggaaagggcaaattaccgatgcgagggagtccgttcaagtttgccgaatcggtcgacgaaagttgcggtcataagtcgatatataactgcaattcacattattatcgagaaagaaaactggactaaaaacggaaaaaaaacaaagctccttggccagcctgttttctgcgtccctgtattctggaatataagaatataacccttttttctatcagtcatagccatccaacatagatatctaggtgttgtagcttatttgtaggtgaggctcaagtgtggcggtgtaggcaggcaattccacacacctctgccgaagatacaagagaatatatcaacaagcaacaaccacacggtatctgggatggacaccaaatcagttcaagctcaatctccagctaccccagtatacatacttcgtggacatgcttctccaattcatgccctgaacatctacagccagaatttacggcttgtatccggcgacgccaatggctggatcgtcgtttgggacctggtcaccaaacgccctgtgacggggtggaaggcccacgagggggctattttggaggcgagaggctttaatgttgacttaggtgcgactgagatttacacgtatgatgattcatccaccactacctagccctggaggtatcggctatcctactaacatctgcaatagacatggccgcgaccacaaactatgtgtgtggaagcttcgaccagaggatgaatctttccttgataaaacgcttccagtggatgtggctgagtccgcacagccagaaaataaaagccagccgtggttactccattccttgcccgtgaatgccctcaatttctgcgcattctcaatagcatttgtgaatgcggatggacttcctggagctccatccaaatctggaaaaccagagaatactctctttgcggtacccaatgccttagactcgggtggtgtcgatatttttcacctaccatctgaacgcaggatcagtactatcccatctgatcaatctatccaaactggaatgttgatggctgtaaatctcttcacgtcaccttctggggatctctacgtcgcctctgcatatgaagatggccatgtgatggtcttcgttcatcgtggagctctcaaatcggccagctttgagcgtgagtatattagcagcaaccctttgaaatgggacaagctttacgctggccaccctcattcccagccggttctttccatagatgtcgccccctcccatagatacttcatctcttcttctgcggattctctgatcgtcaagcatcccatccccagcatagggcctgcgggttatatccctactcctggctacaaagaagaatccccattgaagattgtcaacacaaagcattcgggtcagcagggtctgcagatcagatcggatggaaaggtatttgctactgctggctgggacggcaggatccgggtatactcggctaaaaccatgaaggagctggctgtgctgaagtggcacaaggatggttgttattctgtagcgtttggggacactgaaagcacgtcttcgttgatgtcttcatcgcctgagtctgcaagacaagaacctcgagatacagaccagggcgcagcaggacagacagtcatcgacgtacgcgactactctctcgcaacagtgcagcaacaacggaatcaaaaagtacaagaaactcattggctagcggctgggtccaaggacgggaagatttcattatgggatatctactgagataaatgctaatgctacaaaacaaccatgcgcccatgcttttttgagggagtccactgagcgaaaatcaagccaagttgaactcgttagctccagacatatgctccctcatcttggctctcatcttgcgagcagcctcgtccgtaacatttgttgaagatggatcgtcatcggcctttctcttattgcctgaaacaccgtttcgggctgccttgaagtcctttttggtgtcttcttgtccaggtcgcagaccggggacgttaattttacccggtcgatcgcgcagggcgaagctcttcgcaagatgacctaagtgaagttccttaatgtcgaacatgcttcgctcagctgaggtgtgagtcgcgtaagctcgaacatgagattggaatgcccgtcgagccatttccagatattcagggttatcgagtgcccaacgctccacgtccatctgccaatcggtcgtcttctcctcccagttcttctttttgttgtcgttgccgccaaagccacgcttgagaatctcgtttgcatcagtgcgggtgagcgccttgcctccatcgcggtagccacgttttagtacttcaacatagttctcttcacagccaggctgaaggaagacgagggcacggccatctcgtccaacacgagcagtacgaccaatacgatgagtgtggtcatcagagctgaaggcagggtcgtattcgacaaccaagtccacgttgggcaaatccaaaccacgcgaagccacatcagtacagatcatgacacaagcctcagtactgcgagagaaagagccaagggtggcggttcgaacgttctggggaagtgagccgtgtagtcgatgcaagaggaccggattcgctggggtcgagaatgctctaccgagagcaatggtgccatggggtgacagtttttctttttcttcatctttttcatccttttcgtctttttcttctccgtcgctcttcctttgttgctcgcggtcttgattccttgagaatagctcaaaatggaaatcgactacgtcggcgcaagacatgaaaacaatcgccttcatcactgatccctttcgcatgaacgtcctcttcaagtaggctgttaatgaaaccagacgtagcttagctggaacaatcgcgtacgactgcttaagctgggcggggacacggaatgactcttcctcgtcctcatttggcttctcgtcgtcctcctcggacgggtcggctttgatgtgtaccgcatcctttaaactgatttctcctagtttttggacattcatctttagcgtagcagagcaaagaattgtcgtccggcgcgtgggcacaccgggaacgcggctcgggcgttgcctagcgtcaagtttcttgacaattccttgcagttcctcctcaaatcccatgtccatcaaacgatcaccctcgtcaagcacgagccaccgcacgttgctgacatccagcgcttccgtattgtcgagatgatctaccaatcgaccaggtgttgcgacaagaatgttcaatccttttctcagccgtgccttctctgatttttttttctctccaccaattaccgttccacaaacaagccagttcgcacaatgcaggatgttctccaacacgacggagatttgcttgcacagttcacgggtgggtgccaagataatagcgaataatccactgtctcggtggacttgggtatcgttatgttcgttcttcgcttttgagagatccataattcgctgcactagcggcagaagataagccagcgtctttccggaaccagtttcggcctggatgaaagcatcgctttcctccttcagcaattgtgtaattgagcttgtctggatagctgtcggcgccttaagttccagctttgtgagcagatgtgctgcgagattgggagacaggcccagattcgtgaaagtatccagtccgtcgatcagcggcgcattagtcggtttcgcgtcttctgcgtctctctcctccttgggtccttcgggattgcgcgcttcaggattgctactgaagagcgaggaaacaaaatggcggggatctcgtgggtgttgctgttgtcgtcgatcaccgccagagcgcggggcgctaggacgattgaacgagtctgagtcttccgtcctttgtcttttcacgggccgtgcaccgagttggatctggttcggattcttagatgctgcatttcgcgcagctgcatctccatctccgggttctttctcagatactcggtgggctgagcgcttctttgcggtgagtcggtctcgccatgttcctcccttgaacttagcctcaggcttgatgacactgtcgccaatgctaaagttcataagcattccatcgtccgccattttgaaatatggtgatcccctatgaaaatggggaggagttgtgaagatttttgttgaaccggcgatccaaaagctttcgagactttttttcggtgccaagacttccaggctctcaggcaaattttctccgccctaaggatttgccctactttgtttacgttgaactgcaaaaggtaaatggagatatatttgaatattttgatgtctatcttgcttttaagtaatgtatgtgagcggcttgcttccaaaccatgttatgctaaagtgttagatgttcattactgagtggtcgatatagtatcaagcacgaggatccaagatgatgttgtcgatcagtcgcacagggacctttccatcacccaatccacaagcttcgcctggcttagactcttccagcggtgccatcttgaatgcggtactcaaaaccgcacccttagccgggtcaacgacttccagctcgtcaagggtatcaggatcggcaagagaaatgtagtcgacctcgtaaagtgctctctcggatggcgaaagggacttttgtccggaaaagacggaatctgtcacattacgagcagctccaaggatatctgcccggctgttcttgccgcccagatatacttcttctgcggctttcagtgccttgtagatagtgagcccaacggttcgtctccggtcgcccaggtagacgtttcgtgagctcagcgccaggccatcaggttcacgcgtagttttaatgattcgcacttcggtaccaacatggaaatcctctaccatgcgcttgatgaccacagtctgctgcacatccttctggccaaagtagacacggtcgggggttgtgatgttgaaaagcttcatgcaaactgtcgccacacctcggaagaataccggacgagaagcgccctccagtttggtagccaacggagtaattgtgacaaacgaaccgtttccatcaacctccgacgacgggggaagaccagggtacataaccttcgaagtcggtgcgaaaatggcggtgatacgcccggcacttgcactgttttcgcccaaccgctcgagctcctcattcagcctttccaacttctcaacgtcagtatcccaggtgcggggatagctggacaaatcttccgtgactccgaattgtgtgggattgacgaagatgctgacgaaaatgtctgtgttctcgcgagcagcttgtcgaattaaggaaagatgaccctcatgaagtgcgcccatggtaggaacgaagcctacactccggttcttttgcaacaattggcgccggagtccccggatcgagggaacatcacgaaagacttgaaagctggatggtcggcgaacagattgcgaagccgcggtcgcgtcggcaaagagcgataaagccgtcactaggataaattgagcttatctggcgctagaatttccatgaaagagacatactcgaaaacgacctcgctccattgaccaagcgagacatcttgtgtgaggttaatgaacagaaaacgagcctgggatgagagctacgggcacatctcagtcaagcccacgtgacctgcctcggctgatctctggggaatccgagaaaacatccgggggcgatccgcgggctgattgccgcttgagagcttgggggttcaagctatgatttggtcccgcacttctcctctaagcttctcatttgactcctcctcttcttttctcccatggacctaactgctttctcgtgagctgacttgaagtataaccattctcgccctgcccccttctacaatgccgtctcctaagtcggctattgccgatgacaactcggcacccgatctagaaatcgtcaactcacagttgacaatacatccatccggcttcactggaggtccggaaacccaacatgaacaaatctccgaacgcaaccttgtcagcaacatggcgcgatttcgcgagaaccccttccactttctccgggaagtgagcctatacatgtccggcacgggatggcgtgcatatgacaaccctatcggtcaaccgatttactattctggcttttccgaaaagatgaagacctccatattgagcagcctactgctgcaaaacaagattactgaattggccaatcgtcgactcatggtcgaagagaaggaaggactgctagcaatcaatgaaggtgcaacgctggacgacaaacgggcccgtcgccggactgagattgaagataatcttcgagaagtcgtggacacaatgatggaaaacatgatttgcaagatggaaagcaaaagatttattcggggcgcttattatatgtgcacgcaacttttgactcgtgcttaccatcaaggtaaatattccctgctatactcattctatcgcaagtcaatgctaaacgatattcaccttaggcatccatgtatccagcgaagaagtcctacgtctaagatctgtagccgagactgctaccaagaagaagcagtccattgttttcctgccttgtcacaagtcccatgtggattacgtctcgctgcaactcatatgttaccgtctcggcatttctcttcctgtcatcgtcgcaggcgacaatctgaatatcccattgctgggccctttcttacaacacgcaggtccgttgcaagacaatttcctattagcttttagctagcactaacctgttttaggtgccatgtggattaggcgcagctttggaaatgatcccttgtataatactgtcgtacaagcttatattgataccctccttcaacaaggcttcaacttccaatgcttcattgaaggtggtcgctctagaactgggaaactgctttcgcctaagttcggaatcttgaatttcatcatggacagtatactatcaggtcgggttgaagatctcatcatctgtcccgtcagcactcaatacgacaaggtcattgagactgagtatgacaccccgctggtaccctaaacttttgatgagcattggcattaacccattctctaggtcatacattagcgagcttcttggtcaaccgaagccaaaggagaacttggctgatttcatttcttcgtcctcggttttgaccttgaagctaggccgagttgatgttcgtttccacgagccatggagtctccgagactttattggccagcaacttacgcgactagatcgccccagcaccgacatcaacaacaaacttagctatgctgatcgaggccgcattctaagaacattcggttatcgggttttgtccgatatcaacgacgtgtctgtgatgatgccaaccgcccttgtgggaactgtgctcttgaccttacgcggccgcggagtcggaaagggcgaattggtgcgccgactggactggctttgcgatcgggtgcgagctaaaggtggaagggtcgcacacttctatcgctcgccaacggagacggtagttgatcgtgcgctagaagtcctgggacccaaactcgttggtgtgatctcaggtttagtcgagccaacttactatgcggtagatcgtttccacctatccttttaccgaaacatgctcatccacctcttcatcactgaagcgctggtttctgtcgctatgtacacaaagatcaagcaagggggtgggcctgccaatcaaataatcacctacgaggatttgaagaaacaggtgttattcctgtcgcaggttttccgcggtgaattcatttttccacctgagggcttgactcacaacctcgataaaacgttgcgtgggctagagaaggatgatgtgatcaagatcactcgtaatgaatccagcacaccactttatgttgaattgagcgagtctgagcgactatgcggtcgcgagaactatgacttctactgcttcttgatctggcctttcatcgaggcctcttggcttggctcggtgtctcttcttggattgacgccgcctctcgatagtccgaaggaagtttggatcgattcgaagaaagcacaagatagtgctcaagtcgtgagttatatttcccatgctacaccgactattgtattaatattcacattcacagcttggtaaaacgttataccaccaaggtgatctctcctacttcgaggcagtcaacaaggagaccctcaagaattcttatcaacgatttgaagaagagggtattatcttagttgcgaagaacagaggatcgcgtgtcggtccgtctcttaggctggctcctgaatgggcaccccagcgcgacgaagctactggaaaagttctagctggcggtcgactgtgggactttgttgaattgattgcacattcccgtcgcgaggggtgagttcattttattcagactatctctgccaatatacgactaacatttcacagcaaaaaccgtcgtgacggtgcaactgtttcttcccgcgttcttatcatgtctgatctcgttggacggaagctgttccaaaacgccgcggcatcggtgcctgccgatgtgtcgtcgcggcaaatgcgccggaatgcaattggagctgaggcaaagctctagtcattcccttttgatacccatgtacacacattgtacaggctgcttctacatctagctcttcctgcgtgtcataatctcaatgcacatattttagtaaaacatctccctgtctataactaagcattaattatcagctaatggatgccacctatagaatcaaataggtcatacatcgcttcaaaaaagaggagtaggcttgattcacctgtcagatttaagagtggggatatttggctacgaaggtcttcaatctctttttatagtggtccatataaaagtccagaatttagaggcataagtcgaagtgatagatcaacgattccaatatgacatacaatgtacaatatatatggagtgatgtaggtatgaagtcgtatctctaactcgctaacattgttgctgttcacatacaatcttcaataaataatcaaatataaaaacaacataagacgaatcaaatccaaatccgctgaactgttccccgtaagatcccaaaacagaaaagatgaaaacagaagaaaaaacaaaagaaaaaacaaaagaaaaaaaggctcgaccgctatagaaacaatatattgaagtcaccgaccaaatcaaaccgtcacaaactgacccttcacacccggactcgtgggagccgatcgaacagtcataaccttcggagaggaaacatcgattgacaacttctcaatagccttggtggccaggggcgacctaggaggtgtcgtgaccagagaatcggtagaccttttcgcaaactcctgaagccgacccataatgaccggggaatcagagtacagtacaataccctgcgagtaagtacatgcggtagctttctcttcatcgctagcgaagtcctcgtgagcagcctcgcgcgtaatacgcgggaaggtgcgcagtacgacatggcgagtgggctcgctcgacggggtgtgtttctgatctttgctggtagcgtactccagccagccctcgttcgagacactttctgcgtccggggcggggaaattggcaacgacgagctcgcgctcgacccgtgcgtgtctccatgtctcggcggcgagtttgacgatctttcggacgcccattaggagggagtcgaggtgcttgggatcggcaaagtgcttgatgtggtcgatgatttcgtcgacgatgactgctgctgctacgttgattgattgtttggcgtctgaggtggtgtaggctgctttcagggtctgctggcgccagaatgcctcacggcggacggacttgcgccggatgtccatagatagcatctggaagaaggtgtcggccttgtcatatcgccggcctaaggtgaagaggaagggttggaagactcggaaggttagggtttttgagatgatatgctggatgtaagcacatcgtagttcgcgggaggctggagtattgtcgaggaaaggtggaagttcggatggaattttggaaaggatgtccttggggggatcaatggggagatatccgaaatgctccttggatagattgtggatgagctgcgagagctctgtgaagcagtcaagactagaaagagagagtttattagatcatgtccatttatcgtaatcgttatcgtaatcgttatcgttatcaacatgaatcttttaagataatatatgcccgccgtgcgccgatgccaaacaaaggaaaggtagagaatgaatgacttgtctttgaagacaaagacgaaaaccgaaaacaaaagaagaacaaaaaaaaggacccgaaaaattaaaatccacagggcttcaaagactgacttacaagaattgatcgcccttcgtattcttgaggtcagtggcctctcccaggctggacagtgtctttctcagcctttcgcaatccgcgcccaagttatcgatggtcgttcgcatcccatccactgcacgctggaggtgctgctccttgacaataccgtctccttccaatttttctttctctcgctcggcactggaaagctcgctatctctctcagatatttgctgctccaaggcagcgcgctctgtggtccagagctgctctttctcattgaagtgagcttccaggtctgcgatcttatcatccaattctttggcagcagcagcgagttgttcgtcgtgggattgtcgcagggagtccaattcaccagcatggctttgtcgcagggagtctaattcatcagcatgggattttcgaagttcttccgattcttgtgcgttcttctggtgggtttcctccagctctgcgagcttggctgccagttcctcacgtgtcgatgagagttcggtaagtcgggcttgcagctcggtctccttggattccaaagcagcgatctgcgacgccacttctgtcttagtagcctccagctcggtgcgctgggtttcgaaggattcctgcaattgggctttttctttctcccattcggcttgactagcttcgtgttcactgcgaagctcgcactcacgactctctagagcctcagctgccgttttctcatcctccgccttgatctcctcaaacaattcagtgagctcctccttctgtgccacaagagctttctcctgttcctccttctgagtctccaacgctttttcgtgggcttcggttaactcctggatgctttcatttagctggttgatttgtccctcgagttcgaccctagtttcagaaagctcctcgttggacttctgctggacagctatgccatcttcaaggtccttctgcttctcctgcagatctcccagttggagacgcaactcactgatggtgtgcctcaacttggtatcttcttcagcactttcattggctgtcttcatcatttgagcttgcagagcttcgatatagtagtctttgtgcattagagcttgctcgtgcaggttttcaatatgcttcatctcagcctctcggctcgagagcttgctgtgggtgttacgatacccattaaggaggctgttgatatctggaagcgccgactggatgcgttgaagaagctcaatgtgatcaccgtcgttgtctgggggagatccattctcatggggttggccattgcccatggacaggttttgaagggcctgatatgatgctgcatatgatggatctgggatgctgtagctcctataatggccttccgattggtgctgaggagaataatgcccataaggaggcatcgttccggcagggctcatgacaggagattgaagagcatacgttccattccgggtggaaggcggttcatggggaggcattggcgcggctggtggattatgaggtggaggagttgcagttggtgatatagttggggacatttgagggtagtgggatcgtgcaagcgggctactgactttgggcaccggtgaggcaatgtgagctactgatgaggcgtaaggtgccggggaacctgcgtagggtccgggtaagctgtaaggtactggagagccagcgtaaggtgtggatgaggtgtaaggcacttgggaaccagcgtacggcactggagcgtaaagcgccggtgaggcgtagggtaccggagaagtataggcgtttggcgagacgtacggcaccggggaggctgcgtacggcactggcgaagcgtaggggtttggtgaggcgtatgggtttggcgacgcgtaggggtttggcgacacgtaaggtggtggcgcagagtaggggacaggtgaagcgtaaggggaatacgccgatggtccgggataataatgttggttatcctgggaaggacttgacatataccgtgcttcagtcaaggatggggaaggcaaaggcacacaggcggccacaggggagaatgggtccgccggtagtgatgagactacagtcgtctcttcagggcgctcagcttgattgggctcgtcttgcttgttatggtcgttcaagggctcctttgcttcaagatccgggataggctgaaccacacttgcttcttccacaggcggctcctcggattcagtgccctcgatgggaggctggaccgagcttgcttccacggccggctctttggtttcagtttcttcgatggggggctgagttgagcttggctcgtccaagggtggtacttcgttgacaggctcgtcgactacaggtgatgattgatccacgacagggtcagggatgtcttggggtgaagccttgtcgtctaacgcctcggatgccgatacgggggtttcgtgtacaggtgatactgaatccacgacagggtcggagacgacttggggtggagtgccgtcgtcaagtacctcgtatgctaatacggggttgtcgagtacaggtgattcttgatctgcgacagggttggagctgttttgaggtggattgtcgtcgtcgagcacttcgtatgctaatacggggttgtcgagtacagatgggacagggttggaactgtcttggggtgtactctcgtcgtcgagtacctcgtacgctgatacaggaagtggcgtcgttacttcaacgtctgtattgccagcagtagactcttctgttacttgctctggttcctgcgccttgagttcagggctgccaggagcaggagtagtggtagttgtctgagtctctgtgacctctgggctcttccccttcttaaccttcttgggggctgccttgccatttttgtctttggccttgttcttcttgcccgcggccattgcggtagagtgatgcgtgcccaagacttcttgcttctgacagacgtgttaccaataggatcaatgtgctaaatggagcatgagtgatagttccgatcatatgggatgaatgcactgtacatttgcaacaagccctgtggcgatagctcaagatatagcccaaaaatcgactatagttaagaggtattagaactttgggatacctaaaagcgtaagccaagtgacttcggtggatcgggcagagacctaaactctttggctatgaccgcgaatgaagacccacgaaagcgtagatattctcggggtgtaagaccaaaagaccgtagggaaggaaaaaaaggaaagaaaaagaccaacccgatcgaattttgcaaaaatctctcgaaatttgcatcccaacgttgtctgagcacaacagcggaccgacccttagcgtattgatacccatccaacctcccaatgtgcgagagggccatcaattagacgccagtgccgggaattattgggggcaaaaacaagatccgaatccactcgtattccattctgaactcaagcgagaccagttgggagatgccatggcattgggcatcaaactgtggatttgggcgatcgagataggtggggaattcgacaccgacaggctgacatgtccgatcgagacccgaagacatgggaattgaaatgaggcgatatagcaaaaggacgcgtctcgcccaagtgtggtcaactggcaatagtgaggctgccatcggacaacacatattactagatgaggcttcgaacatacggccatattggacatgcagattgtctactccgtactttgtatgccaagtagatcgggcttcagttttattttggtgttttgtatctgtacatagtactacacagagtgcattgcattgcatatagtactgatgtatctattgatcatgggagtcttgcaatgcgatactgaatgcatacgacgtatacggagtacactgagttggttcaccttccactcaacacctggacatgagagaatgaaaatatcagatcgattccagttgaaacatgagtccatataacaatttaatagccagcctaaatacacctaactataactaataagctaactaataaacgaagatcttagaccacatacatagttagggagcgaccctaaacccaatacggacatcacgtgtcatcgactttcactttccgcctcgccctatcatcactccccaaagggtcatcgattcataatcaattgcttccctccacacaatgttcgctgccagacgatctgctccttcgacgcggcagctgctgcgcactcagcgccgctggggctctcacgccgcccatgagcccgtgaacgaaggtctcggcgtaagctcttctcccccgcccaccgcgaccagacccgagtttggaagcagagcaagatatgcctcgatcgcccacgagtaattggctaacccttacgtgtacacctaacagcgcagcttctacgtcacatctggcaccatcgcttccgccttcgtcctctaccacatttccaagtccatcaaggaatccggcgaggcatcttggatgaccggcctcattaacaagtggacgccttcccaggaggtcttcgagcagcgcaatgctattcacaccgctatcatggataaggctgcttttgatcgccacttgcttggcagtcaaggcccagccgaggcttttgcccacagacagcccgagtatgtcatcgtgttgctccggaaatgcttttcattgttgtcttgctgactgttttttctttttccccaggatgttgaacgctggctctccgttcaacgtttcgcccggttcgcaggccgacctgagccatgtcgtggctcactaccagcgcaagaaccaggagatcgaggagtctcgggtcgcgcggacgaaggacggcaaggtcgtgtcgctctacgattaaatgggggtatcttttctctttagtcgactgtctaagtagacatgtgtggaggaaaaatcatgtacatatacgttgggacttgacgttcaatccagcacctgataattggattttcttttgtttttgacctaacgcccagatccttgctgaatattggttgaatgctggttttggatattcattttattaccgaattcgctaaggcccgcttgacggtacaacctccaaaactactctgcccacaccctcagattggacgtccaatttatgctgcacatccagctcattagcagagacagtacccagcacggcaaggaactcatcaacgccaccaccaactccgaaataaaccttcttcgccgcgacgagagcccgacttttcaccgatgcagtgttcgagcggcgcagcagcgccaaaagcgtctcggaaaacgcagccagcgatgcgggtgagtaaatggtctcactagcaagaactagagtcttgcgagcaccatcaccggacgagaagaccaaatccacaaacccgggcgaccaagcgcctgaaatgaaatcaaccgagatcccacgctgagtaagatcatctttgaattcttgaaccagctcaggcgtgatatccagctcctcgtcttgccctcgtgcagttaacacggctgagacagcggtttgagggcggctattgtgccacgtcaaaaggagattcgggagcgtgacaagacggagcacgtcagagttgtagtctgcaaaagtaaagagtgtctttatttgactctggccgggctgggcttggctgagaagacgggcgaacagtgtcaatgatggaactgctgtgcctgcgccgagctgttcattcatgttagctttcttctgccaggtggaatttgggagaaagcttccaaatggcggatgatttacgcacctcaataatatggatgtccgccgagctatcggaggattcgttaagaatgtcctcattgagggagagcttggctagatccaaggcacattcccaggttttgaagccgccttcatagaaattgggcgtgatatcgcctttttcaataccggcaataagctcttcattatcgtggcctgcgctgtcttcggccatgagctgggtgcgaatgtcaaagatctctcgacgagcgacgaccagaggcgtatcgctaattgagagcttattgtagaagatttgagaggggagaattgaaagctgccatcttgattagattttgactctggtggaaaggtatgatgcatttcaaagtaatgaattcatgctttcatgctctcgtcgatgatactcttcggcccgaattgggatttagaatgtactcgccaactcaaacaatataatacgcataattgagaatgaaatatcttgcttgatcacttacccattcattcatatcatgcctactcgctttcacgagctcaggaagagaattgcccacggcttgctgggaaggcatatccgagaaatcttgattgatctctgaatcgtcaatgtcgatatcatcccccgagaatccgaaactgaaggccatcttcacgtgaataagacggctgtctctccttccaagacacctagtattgtgtaggtgggttgtctgaagtggcccagatgttgaattcgtcgaaattgtaggttgtggacaaacttgcaccagttttggcaagaactgtatattcaaaggtaaggacgaaccgattaaatagtagtttagttccgaggctttcttttcacagatgctgtgatctgatttcaatactccgtacaaaaaattgcatggtggaatgatgactaagcggatatctggcacggggccttacctaggcaaagaattattatttatacaaaccttggagacaacggattcgaatgctattttgaaactgttagagtcgggctgtaataactataatatgattttgtaatgatctaactcataatgccatatccaagtgattagaaactgatgctgtctattccaatattaaatgcaagccgaagacgtgaactttaaattataggctgcgtttaagccttctgagccactgcagccaagctgagagcctgcaacacatcagcgtgcagatccactgcatcctcaataccacagctcatacgcacaaggtcatcgaagacaccggccgcctcgcgctgttccttgggaatgcctgcatgggtcatgctggaaggcacctcgcacagactctcaacaccacccagactctccgcaagggtgaagatcttagtgaacttgcagaaatcgtgtgcagcctgctggcctcccttgatacggaagctgagcataccaccgcccataccgtcacggtgctgcttgagggcaatagcgcggtgggggtgggagtcaatacccgggtagttgacggagatgacgtggggagaggattcaagggccttggcgatgacagtggcattctttgacgcctcgcgggcgcgcagatgcagggtctttagaccgcggtgagcgagccagcagtcgaatgcggacgggacggcgccaatcgcattctgcaggaagccgaggcgctctttaagggtctcggaattaaaagcagccacgcccataaggacatcctaggttcaagttagctgaattgatactggcaatgcgtaaattggaagtaagaactcacggagtggccattaatgtacttagttacggagtgaacaacaatatcggcaccgtggtccaatggattctggacgtaggggctcatgaaagtgttatcgacaacaacctgaatgccatgctggtgggcgatgttggcaacagcccggatatccaccaagccaagggtcgggttggagggggtctcgatccaaacgagcttggtctcggggcggatcaacttctccacatccgactcaatggagggggtgaaggtgacctggacaccgtgcgccgaagcaaccttggtgaagtatcggtgggtaccgccgtaaacatcagagaccgaaatgacatgcgagccagcagcaagagattggaggatattggccgtagcagcagagccggaggagaatgccagagcatacttagcatgctcaagagccgcgatggcttgctcgaaattatcactgtggggggtattagtccgcctgatcgatgtgtcaaaccgttggactaatagactgaccggttggggttggagctccgcgtgtactcgtacagaccaacggggtttccgacactggtctgagcatatgtggtcgacagagagatctagtcaaggtatcgttaatgccgtctttctttctcttctccctagattgatgagcttaccggagcaatgacagcgccggtcactgggtcatgaggcgagccggcgtggacagccagtgtcccaaagccacgctcagaagtgtgtccgttttcaatggagcccattgtgtatagagaagatgatttcaaggcaattgaaagaggcgaggggtaggttatatgtttatcgataagatgagatcacccgctttctttgtatgacttgtctgaaaccggaatgagacacggattgcgaatctgattgataatcaggagcgatggcgaataacagattcaatgactgcttttggatgttttcgtgctgaaaaattcaaccgagggagaaaaaaattcatcagaatccttttacatactaccaaccttggggggcagatgacgatggatcgcgcgatttcgactggacgagacaccgacggagctccaccggctgccggcaattctgctcggagaaccgtttggatacgccgatgagtcggacagtcggagagttcggcacttgccgcattgatctcctaattggtgtgtacgatactatagttatgcagtatattttatatgcatgtccgttattttcggaggtatatagttacacttgcccaggtgtattccatgtcaaatagctttacactgtcatctcggctcattacacatggtctatcaggtatctttatattcattggcattgattcgtatgggtatctatctgatctgactctaaaacaaattttatgggcgctgagaacgggtcgcgataggcgaacaataagacaatctaatgagacatcaaatagtggtttgctggcagcagcagcctaccaccaagtgatgggtcccgttccacccatttgcatcgagccctagaagatgattagtgagagctagaaaatcaacatggagagaccaacaagaatggagtacggagggcgcctctcctgtggggtttcatctgcaacatctggggcattggggatttggtcgtgccactcttctgattcgactcggaatcgtacaacttctcctacatcgaagaagaattccgttccaccttcactctcccagatccatacctgctcggcatagtcgctgcaagacacattagcatttgagatttgacatgaggtgagaaacagctcacaatcgggacttctccataagcatttgtggcgggatcagaatatcattgaagaattcgatgccaactggacttcgttagtttcgacgagcattgagtttttatactggaaacacactcttgattccatgttctgtgccgctagcgatctttccaagcatgatctcccctttgaagggtcggaaaacaatcatgcggaatttaactatgatagtcagtaaagagctcatacttgagaaaggggtgacatctaccgttgacattaaccaaccccgttccgtggccaatcaggccatcggaagactcaagtaggtcatagaagctgatgcagaggccaattttttgaatgacctagagcgcgggataaggttcgagaaactgaaaggaagaagcttgaattgcgtactttattggcatattttgcattgatgttgtcttcaagtgcaactgcactgaacttggagaaatcctcaggtgaaatctgaatcaagtccgatatggtggtctgccggcgttagaaaaaagtcttatatatgggcgtcaaacttactaggataaacatggtggcggcgaggaaggtgtagccagaagatcggtctgactaggcgaggacgaagtgaaaaggcttaaatatcttttcccgttttaccattgtcacgaagcaatcaacgatcaaaaacccttctgagattattgctccgcctataatcccgcccacacgtgaccccgggacggaagctttcaatttcaacctcgactccgctaataaactaaacttaagagattattcttgtgttggtgctggagtctccagcaaaccaaggctctcgtcatgagctcgcagggattctctttccctcccccgccgcctccgccgccagcgaccaaccaactgccggctcaccacccgacccaacatggacagagttggggtggacgcggtggacatggcggaggtcagaggggacgtggcagaggacagggaaaccgaggtcgaggaggaaatcatgcagaaagtggacgagcgccgtcatatcctcccccgacaggtttcaactacgcgcaaccaatgtacggcggatatccccaacctcttcctacagcaccttatatgcctccccaaccctaccatcatggacaaacgccggcctttcaacatcctcaaaatccacctccatttccatctcaacaatatccccagtcggtagctccggggaattatcaacactacaacacgcccaaccttcctacaccttaccctcccacaactccgacatacatgcaaggtttacaacctccgcatggccatcaaccaaacaaccaagcaatgatgcctcccatatcatggcgcaatgagatgcaaggtgcggtgccatacatgggggctcaaccggggcaagcacgagggccacgacctccccatgcgtatggcaatcagggtccgaaacccaagaataccccaaagcgggatcactcatctgcattcaacaaacctcaatcaactgcgcctcgaacccccgcagcgcctgccgtcccaagcttcggcaaccctctaccctcgaagccaccacccgctgcagactcgaccgccaacagaaaggcgaagaagagaaaaaggaagcacaatcaacttggactgacccctaataccgaggaccacgagtcaagcgaagaagaggttgacgaagacgaagaatcgaagctggcgcaaagtggatctggcgcagcaccacttcaggtctcatacaaagggaaaacggcaacattacaaacaccgtccgatattgccgcttggattgcagaacggaagaagaagtttcccacgcaagctcgggtggaagaaaagaaaaagtcaatggaggaggcaaaggcagcccgcgagttgactcgccaacaaaagcaaaaggagcaacaggacaagcgaaaagagcatacacaaaaacaaaatgaacacaagacagatcccgctgcagatgcaacgacaaacgcccagcgcagagagaagattcggcgcaaccttgaacgagaggagaaacgaatccaaaaggccatggccgagaccgaagctgctcgcctccgaatggaagctttacagaaggaggcattgagcctaaatgaagactttaaccaagacgaagatacgggtagcacgatcgagcaaccggccccggttatcaaagctgaacccgcaaccgcggtgccagagccagctatgaaaaccgaatccgaaaacgcggtaacggagccagccactaagactgaactagagaccgcggttccggaggcgaccatgaaaatcgagccccatggcccaattccagagcccgcgcaatcaaccgtggaaagcggggatgcgacagatgcgcaaggcgttcctgggcttttgttcgagtcccatcatctcgagcacacaatcaagaccgagcaccccaccgaccatgacttggatgccatggagctcgcatccgatcacggggccagtgattggacctcctcgggtgcttctggctcagatacagactctgaccctgacagcgatgactctgcgccagagcaagtaacttcacgtcgcacgggaccagagcgagtgccaccgccaccccgccaaggcaaaaagaccgtctgccgctattttgcacgtaatggccactgtaaccgtggcgaccagtgtaaattcctccatgagaatgactctgaacgaccctccaaggccagggcaaagcctacggagaagaaggagaaagagacgaaacgcaagggactttatcaagctgtgagagccttatttattgattttgctcgtattgaagctgtactgactgggattagttgctggaccgacagcagcaagacgatgaccgccgggcaatggaagtgatattctggctcggtcagaacaatatgctggatgccccacacgataccccaatgaattagcgttagaactggaactacgaaacattgaagcgcaaggatgaagtgaaaaaggtcatagctcggaggcgtagggggctttggtcggatttctaacttggatgaatacccgaaccctcagtcgcgtggctccgatagtacagagtcagcgacagggaattgaaagcgaaaaaacatgccaaaaacataccaaaaattacgttgaatcacatctgatccccattattctgcctagccaattatcgacgtatccaatgatgtgatctaaatttatccccccaagagagggttgtctcgtcgaagtgactgtagccgaccaaagtggatatcgtcatttaaggtcacgtcgagttcagaccagtcaacgccggagatgccctgccaagcgaggaaagatggccgtcagtggtccgaaaactcgtggatcaccgccacgctctcttttttatcggttttccctcttttgccctggatttgtctcctattagggcctcgcgggccctctttgggatggacggcggccaatcactcgccttgcttcctttgtatttgtttttcctcgtccctttgactctgccggctgtgcctagctccttatccatggggcacatgccctcttagttataaagctaagaccaaatatccccgacggtcttttcttctatatttgcctcttcacacgccttccactcctttgaggctcttgtgatttcactcgtttatccgcatctcccacttgaacattcgtttttcccaacctatatacatataccagtcataatgcgcttcttcatctctctcgctgtcgccgccatggccgccgtcgccgcggcgaacagcaaggctaaccccttcagcattcccgtcgagggttacaccttcaaggtcggcgagcctaccgctctgaagtgggagcctaccaccgacggcactgtcagtttgatcttgcagtggggagccgtgatcagcggtaactccggcactgtcattgcctgtaagcaacctggggatccatccgaatgactaatattccccgataaggcaccgagtctgactatcaccagcgaatatcgataacgacggcagctacacatgggatgtgccctccaagctggccgcccagccagactacaccattaagatcgtctcggacgatgatagcgacgactacaactacatcggccgtttcaccgtcgagggctccaccgtcgaggtcacctctacctcttccactgccagctcgaccaccgcgtccacttccactcagtcatccaccgagtcatctacctcgaccacccacaccactacctcggagaagtcgacctcgacttcttcggccaccaccagctcccccactactttgaccaccgcttccagcactgccaccagcactgctaccagcacctctgcctcctccaccgagtcctcggcgaagtccacctcggccagcgccagcgccagcggtagcgccagctcctcgggcgctgctagctccacgcccgcatcccagagcgccgtgcccaccaccaacgccggcatcgccaaccgtgtctccggtggcatgcttgccctcgttgccgctgctctgatgctgtagattgccatgcatgcagatattgtcaggaagaccttgttgcaaagtcacgttgacatgctttattgatgtatatttttttttttttttcttcacttctccgattggctgtttcctaaaacagccaatcaatttgtgttattgcctgtcccttttctgaggtgcagctgtacaaaacatcctcttctctgactacggtcgggattgtggctttgttattatttggtatactatttgtgtctccgtcagcggtaatgactgtatactccctacaatctactttataattgtgtattccctttatctgaatgatatattcgagtcatccgagtcatccgaatgaatctgtcagaaagacagtgggggaagtaattaatttggatagtcccgcgtccacttttttaattgtagtctaatctcgctggtagaaggaccttggatacagttgaatcacatataatagatctctagctgtggggagtatatatgtactccgcgaacattacctattcagattcaaacaggctatcctcccagtaaggggcctctctcaccgaagtacagagtagtactcctcacgaaggacataaataatgatcgtccatcggtggagacggtggccttgaaaaaaccaagcaaatttccctactaagtagggattttctcgtctccacagggttggagttgcggttctacatcattgttgtaccttgcaaagtctgataagcactttgggttattctccttctggtttttgactagctccgactagcaacaactcttctattttcctgtggcgatttgaaccttgttgtatcatcaagcctcgagtcgatctccgcggattgtgggcgagtgtatcgcaatacttgcaaggttcacgaagtacatgacatggacaccctatgtaccttcataggcacataaaactatatagtactcagaaatactcatcgcttacgacattgtcttgaccaagtccttggcttgtcccacttgaccatgtgcctgactcgtgaccacacaggcaccagcctccaggtaccaggctctctgcgatgaaatgtcaatctgctgagcgactcgacgtttcagttctccgtgaacgatgtcattgccagatggactaccacaccatgtgtttccaatatttccagggtctacttactccctaacagttcttgctatgctaggcaccagcgctatggaaaaagcaaccctggcataaaaaaccccattcaatgcatggctcttgacacaccgcataagcaatatgggagccccaagcaaatgaaccacgtcgctcattcttataatagcaccctggcatcgtcatcaaaagctcggctccaagcaagggtcttcacaaatctatcgcaggaacagtccactccacctcgtgtctgcagaggaagcaaggctcctaacactatgaagggcttttgctggaaatcttgaaacatccagtccatccggtcaatcaatagggcggattatggatctgggctctgatctatcaattgatccatgcccttcgccaaagaaaaatgtgattgcctatatgcaatggatgcagaagacatgcagaaaccggggtcctcgctatccaccttcttttgaaacatgaatggcccagcttgttcttttgtgtcacgttgctacaagatgacatcggttattggttggttgctgcgaacgatgacatgacagctgggtttgcaatgatcgaaccccctaacttgcagcagagcccattcagggctggaggatgatgaagatatttattttcgctagaatccgggctatgctgcataatttgcttattataaaggtgctgttgcatcctccctacaatatagggattggaaggtttttgcttgctcagtagtgccattcaaagatcaggtcagagcagagcagcatttgtcagatatatccaatgataagagggtccactatgctatctaaattctttcttgcatcggctgcgaccgtcgcggcgttcgctggcctagccaatgcccagacaaacatcaccgagaaagactgcgcctcctcatccgagtactcaaagtgcaacagggatgtcgcggacaagtggagctcctgtctccgaggctgtaacggcaatggtaactgtgtcgtggactgtggctgcgactctcaccagaagtatatcaactgcatggcggagtcgtgctggaaccaggtatgactttatatacaatttggtccaaaggaacacccggcaacgtctatcataaatccatgctaacaatatcttaatcctcaggtctactcttgcaaataccaactcttcgtgcagcagtacttcgccatctgccccagcgccaaagagccaatccccttctggccaccgccagacaacgcgccaaaccgctgctcatgcgatctaggcaaagtcactcaaacgacgctctcatcgcgcaaccagcaaatcaaatgcatgcgcaacgtcaccgacaacatcagcgcggacatcggcagtatcccagacctctcgaaactcaacaacggtctcgacattgccaaccgcgcctcagactgcgcctgctgcggagctagcgctagtatctccgcgtaagtgaagcacaccaaacccgcgactcttccaaagcacgaactaacccccgaaccccagatcctgggatatctgcccgcacaccgaacctactctcgccggcgcagacatgtggggagtatttttcccctccgatctacccaatctatacacctccctgccgaattgggcgtggtcgtcttgcgactcgacgctcaaggatacgacgtgcaaggacctgggtttcacagatacggataagttctacaagcccggcgatttcccaagtaatggcacctcgaccctgtacgaggttgggggtacggttacggcgcctcctagcggtactgttctcacttggtctcaggtgtcgactacttatactgttaccgcgactgggtatgacctcaaggctgtttctagccaaagtgagtaccgtgctacggctaccgggaccgatcaggcgtttgcgacgcagactgctgatagtggtgctggggctgtgaggaatggtggtgttggcgctgttgtggctggtgtttttgcggttgttatgttgtagcttggtggttaataaaaggtatgcatggactgtgctggtaggtggagggttggagaagttgatgtttttgtggtaattcatgatgtgatatgaccggtttatggaaatggtatgtggcgttcgcagcttatgtgttgcatggctactttgcaatagctgtcatgttggttatgccggtggatggggagggaggactggatactactcaaatacgaacatccaatgcacaagttcctttctcatatcgcagccctagtgttgctgatatcttcggaaatggtcgaattacggtggtgccgggtggtgatgaatggctaggatattttgcgaatgcgattaatctgaaatggaaaaaaacaatgcttctcaattgtagcctgcagagcagctatgaaatgatatgaaaatgccccgaaaccgcccagaacaacgccagttactccgtagatatcggtatcaaaagttggaactatctcccgctagaaaaagcacaggcaccgtagtcagtgtcccttaggacgaaaaagcaaaacaatctacgcatttggtgcaagagacgagaccatcacgcaacccacgatgggagaacccgcttcaggaacttcatgaacttccagaacccaaccgcgtactcctggttaccctgcgggtcgacaacccgctcggggaacgcaataccggcaccaaacagcccggggatgtcagatgaacgaccaggctcgtggaacgtgcctttatcatgatcaaagctcatgaaaaggggcgcaccattcttcgagagagccgggagtgaggtacgggtatacccgacggcctggacgagatagtcacacgcgggcaagtacttatggtactgagcagactcgatctcctgaccaccagcgcagtcgatcttggccagaacctggcctgcgtgcgaagtgggaagcttatcgtcttccagctcggagcgagcaaagtccgcagccaggcccttgagaccggtgttgtcgcgcagtatccagccgtccttgtactctgcgtagcggagggggtgacgggtgaaccaactaatacgcaggagagggtgggaggtttgggcgagcttggtgaggttcaggatggcgaggatggcgctgtgggatgcgccgacgatggcgacggaggtgggtctgtctgaggggagggcttttgctagctcggtgggcttgagcactaggtcgaggtccaagcgctggatgtccagtccctggactgggatgggggctgttgtggggaaggagcctgtgcagaggatcaggcgggtagtctcgatagtctcaagatcttccgatgaattctgtttgatgcaaatggtccagttggaggtctggattgtgatgttattattagccttcatgatagacaaggagatgtgcaataaccactaaccgtttcgttcaggttggctgatttgacaaagccgtggcatgcatatacttgctccatcttcaatagaccgtccgtcaggccacgaaccatatccgctgcaaaaccaagggggcaggtagcttcttggtcaagcttggccaatttggtgaacgcattaggtgatttggtattatcgataattttctggaaaggctgtgtggctgttgcgaacgtttggaataatgcaaccttggtgttactgaagggtaccttgttagtatcttccggtctgcgttcatgtcgagaagtgtacaaacctaggaacttcgcgatacttgctatggactcgcccggcctcgaaagaaggatcgacccatgtgattgagcccagctggcgctccaacaagtttcccatgacagcgactccagccggaccggctcctacgacgaccgctgcgcatttccgagtagccatgttgggtggtgatttagaagataggcgtaagagtgggaaagcgaataaaggactgaagcgattcaaaggtgtggaatgaaaaaagagttgtaaaaataacggtgatttgagctactaaataaacagaaccgtagtagctatcgcgacgggggtgcgcgacgtttaaaaagggggaacagtcggctaagacccagactccagaggacgcatcatcggcgacaggacgcgtggtattcacacagataacgcaacataacgcaaccagcgtccagtcaggacatcgctatagagcgggcacattcattattcccccaatatcccatgacacatgtgtagctctcggacgagatgggtcgccgttctatcgacatgtgttgaccaatccatcctgttccgcaggtggggatctttgacctaaaattggcttcacagttggcggttatctcccgagactttcagacggcgactcattcggcgactcgttcgggagggtttgagtcggcgactgggccccactgtgcgcttgccgtcggcctgtcggcagggtcgtgctcagttagtataggaagaggtgctcatgggataaacaccattttcagggcagatcagcggttggactgcatgacgactagcagcagggagaaataaaaaaaaagtcaagcagctaaggaggccgtcggctttatattgtgctgttttggcgtcgattaggcagccttggcaaaatggcgtgatcagttttgggcttcaaagccaatcatcggttagtcagtttgttgtatacaacttagttggttagttacgatgtatgttgtatgttgtactccatacggagtacaatcctagttgtcagctaagacgtggtaactgactagttatgatattcttctgaaagggcatttaatactccacaaaacgaaaacatgatatcagagaacatccatatatacatcccctcatacagcccagtaaatcctcacgctcgcttgatgaacgtggtttgaccagccgggaaaccttgcccgggcccaaagggcaatcgaatcgccaatctctaactcacgcacttcatgtccatcaagagtaagccggccacgacccagagtcttctcaatctcaagtgcctcgggcgagtctgcctggatatcatctcgatagtcccaaacaattatattgtgctgcatctcgctcacgtgggcaccattggattgcaatttgttgtggcgcggcaacagcagcgcatcttcctcggtatagtgttttcggacttgtccacgctcattgtcgaggatctcttgctcaattccattggcatacatgttcttcgtatgcgctccgtgaataacttcgatgtcaaaccaggtccatgaaaattcatacatgttgtcacggcatttcccactgccttggtcatgagatgagatattgaagactatcttgcggcaagggtgtgcaccgcgatgaggtaacggggtaggactcgagtcttgctccaagctctagaaagatatcaacacggccgtcagctaacttgggagcagataggcataccttccgatcgtagcagaggggaacagtcttcagcaaaacttgatcacaatctttttgaatgatccgatgttcttccagtttctgctctattgaaggccaatattccgcagcatcaatgatcatatcaatgagttcttcgggcagaccgcgtgggaccttccgttgcaacaaattccgaactttgagtacatccgctatgctgggattgaaaacttgaggtcctgggtccgagatacacgtatccaccccatcagaatctgtgccgttcgtgtctgcagagggttggccatgggaccggcggcagtttcctgggcgaactccgaaaggtaacatggtagtaatgagaaatctaggtgctgacttgaatagaaagacgtcgatacgtatgaaatttcttttcgctctgtattacctagcctcgggagctagcttcggctttgtttttgtcgactcgtatgtgcacctcaccccgcatgccacatggataaataaggctggaactaaagtacttcactttgggcggttcaagctattgatttcgttgaacgggattcaaagtaaagtgatgttcaacgtgagtaatatggatccgatggtggaaaggaaacagttgatggtcgacaacttgtacggagttacccgtgaacgttgattgttgacaatgacgtcagtgtccccagttataactagctgactttgcatagattaactatctccagggctggaattactacgtagatgctcaaattatgcatatctggtctcgaattttgtattcttcctacaatatattcaaatgcccttcctaacgcccatgagagatacaataaggcttcttttattttcagccccttctgccacccgcagctttgtatgcggcagcccgcttgctgcttctgctttctcgcttggccttcgatccacggcttttctgcttcattttgatggatgatgatccctcagtagcgcggtgaccctcgaacacgaaagagttgccggcaatggtactgttagcatcggccttcaccttggccgcacccgctcggcccaatagcctgttggcacgtccttgcatcgttttctgggcctcatctacacgagacttcttggtctcggggccggagggttcgcgcttcttagcgattttacgggctcgagtgacacgcagcttgcgggggagcataggcgggaagttctttccattgagcggaagcgattcctcaacaccattgccatcgtagaattggacataggcaaatcctttgccaacacgagtggtgctgtcacggatcacgcgcacgaactcaacgttcttcttgatggccttcttgtccttgcctccagtgtgggcgttgaaaattcgccagagaccctcctcaatatcggcgggagcgcgaaccttcttcttcttgccggtcttctcgtcctcttcgggagtctcactgtcaatgaaagacaggttgccgacaaagacacagcgcttgtggtcaatttctgaggggtgagcaaggctatcaactcgcaaatgacggtctaagaccatggtgccgttcaaggcggcgggagccttgcgtgcggcgtggagagtggtgtagacagcgtatgcgttggtgctgggtgtggtctcatcgaggatctcgcgcttcgcaaaggaagcacgcttgggaatgccaccgccactggcgaatgcaacagagcggaagcggatcgattcgatcttgtgcgggccggtggattcaggaagcgtcgaacagaaagaggccaggtgcctgagaagtgttttcttggcagtcttagatctgatagcctcggtggagacgttgcccaggaagacagtgcggttggacttctcaacttcatcggttttggcggaaccagtcaagctctcgtgcacaggtgcaggagcggcctcctcgtcgccggtgtcttctgataccgatgctttgtctgagtcctcgccttcctcgccttcctcgtcttcgctaccttcttgttcggtctgcttttgacgctttgcttgctcggacttcctcttttcctcatccttctcctcctcctttgcaatgcgacgcatatatgtctcctcgacatcctccccggcactgccacgcttgcgcttccggttctgtgtatcggtaggttgttcttcctcctctgcagcatcagaatcgctttcttcgccagcatcttccattaattcatcgcctgatgcagatgattcatcttcttcggcaacatcatcttcgtcattttttgcctgttgtgtgggcttgacgtacttgatcacgggtgcttgcacaggaccagcctatatatggtcagttcaaagtctgttaattgcgcctcaagacagacatacactctgcgcaaaaagcgaggacagtgttgggtccagagatgcaccaccgaagggaagagtggcagcggacgtgctggtcttctcctccgtcttggacgaagactttgactttttgcccattttgatgttcttggtctgtattatagtctaaaatcgagtggccaggaggtgggtttgttgcgattgacacttgcgccgatgatagctccgactttttttttccctttagtttctgcttatcgggtcttggcatggaaagataattatcacgtgaccaggaatacactcaagagtagatgttcctacagtatgcggtatatcagacgttgtatatgctagatatgcattaatattaaatatgcatgctttctgtattacttattcttcttgtctgcaagtacttcactctgtctatgtattccaggctgggaggttcttatttgggaccgggcggtaagctgtggatgtatgatgcacttataaaccatctaacctagtgagactgatgaacagattctttgttcttcattccttccttctggcataaaaatgcagtatcaacatattattctacaggatggcctgtctctttccaactacgtcagatactatatcacgtgacttgcttttttttcttcgggcggtgagctttaccctcgccggaacgcaacgcggcagaatcggcggtcactcgcttctgttgctgcaccccatctagcgatctgctgcttttgtctgttgaaaccccctctttccgctgtgattttccatccctgatcattggtttgatcttgatcaccgtccctagccacttcttcatgacgccaactcctctgcgactcggtaccctcgtcttgtccgcttcctagccatcctcccctcgtcctccagagtcggtctgcgtaggattcgtcggaccgaaagcttttaccggttacaatagtggtgatacgcgtggacctggaattccgtcataaatcgcgtctcaggaacgcggtggttttgggaatcgtgctcggtcgcgagcagctgtgctcattaccggcgtcgctcccggcgcattgttgaaacggtacgtcgcttgaggttctacatcaaccacagacctcatctggtcattttcgtggggagggagcgtctctatatcttctggaactactgtgatcggtacacttgctttgcgcggcctctagtccctgtgctgagcgactgttaccgaatctgggggcgttcgatgatcaatctccgcaccaccgccttctgggggcgctgacctatctcgcacccaccaaccactttttgcccaccaactccgtttttaactggttttgccgagttgatatggcaattgagctaattctatctgtggtttctccagattctcgctcgaaacaccatctggtggatcggtgaccttccttcctctcacgcccgcggctaatctcaacctcgctgcaagcaagcaaccaccttatactctccccttcaaaccttcttgtcttcattcacatcgtgttgcgccagctctcttagctgcataaatctccatggaggtagccgagagcagggaacaggcctccgttggtcccacaacgggggcagagtctacattccctaatggcgagcggaacccttttctggatgacccgctcatggacgatgatggacgctcaagtagcttgagtgagatcgacgatgtctcggacaacgagccgtccgacttcgaggatccaatcaaatcagacaagccaatggagaatgattcggaggccgaaaccgagcgcatcgaagattctccacacaatatccggaaacatgacattgtgttgagcgccgctagtgccggaccaagccctagcaagcttcatcaatctacaacactcgatgatgttgacgatgaagcacttgtggcagacgattctcctagcaaaccgcgacggtcttcaaaaaacaatggcttgaccgaggatatcccagacctaggcgacctaggtgattcggagctgccagataatctcaaaaaacgaaaacacgaaactgtcgccgaattaggcgacgaagagcccacgaagaaacgccggagctcaatcaagagtgacttgagtgacccgatagacgatgatacccccctatcgcctgagccgctcggtaatcccatggatatcaatgaaaatggcatactggttgacgaagttcctgagtcggatctcccagccccgccttccaaaggcaaaaagggcaaaaagggtaagcggaaaggaagaagggcccaagacggcgatgaggaagcagaagccggggtcgaggccacaatagagtatgttgctgatgagattcgtggagaagacgaggagcctacggaacgagtagatgagcccgatgacgcagaggcgattcttcgagccgaagagtgtaagtttatccctttatggaccttttgggtgcaacatatactgatgcctagttcagcggtgaaaaagatgtctgctatggattcccttgtgacactggagaaagaatttgcaacgttacgtgacaagtaaggaatttcccccatctctcacatgcttcgacgctaataatcataggatttatgacgaacggatatccaaactcaaccgcgagttggagatgcttaccggtccgaacccgacgcatcctgagtacttgcggcagatcgaatgtgtgcaacgttaccgagacgccaagatcaaatacgaacaaaacttgttccgacaccgcatgaagtcactcatgcacaagggtctggccgagcgaacacaggctcatagcacatactaccagcggattcgggatgcgcgcgagcggcattcaagtgcagtcagcaaacaattctatgccattcagcatgatcgcttcaagacagacgagctaagcccgcaccatatcatcccattccccacccgccgctcgcagcaaatcgcacatcagaccgcatacaaccaggaggtttcaattatggccggtgtggccaagtatgttggcttcccggctgccccgtccttgatgggtgcacggccgaccgaacttgatgacgatcttgaaaagatgggggtaagtcatattcacattcactatttggtcagttgctgagagcaggtcatagattcatatcgagtctcgcgcttcggcaccacggcactcatccgcaataccgtcacggaccaccatgtctaccatgtcttccaatgctttccgttcggccgcagaagaagcatttctagaacaaacaccctgggcaaacccacaacatcccatccatcagcaacaacagcaacagcactcgcagccacctcgactacaaggccgcacatttgagcatccgcaacaatcatcatatgcaacgccagccgctcaaaagcgggtagtagacatcaatgcgcctaatggatctgcatccaccattcccgagaacgcctctgctgccaactcatcagccaacaacaccccttacggcatggagcaagatccaagccgtcaaacgcaagggcccttccgcaacccagattatgacaccgatcatcgcaaatctgggttccggtcattaagttcatctcccttggatgtgcgtaaatcacagccgcatatcaaccatgtcctcgaacaccgttctcccataaccgacgcaccatcccacaatcacatattctctccgccttctgcacgccaaggcttgtttcaaccttcagccgctccccaacgggagacctcgccatccctcccgtctaaacctgttgatgtacattaccgcgcccatcaatccggaatatccacaggtcctggttcaaaccatatgcctaatcgataatcgattacctttggcgattcttattgaaatgacccgtcagcacccttcttaataccccgagagtctcctaccctcctctttcatgcatcttgtgcacttttcttctcctgtgataaatcctgtgtttttctactctccagctcttgctccagcagcaaatgtatcttgactgtcattttcacgcgtgttgcatgaatggaataccaatttggggtcttgtccttgagtttcaacagcgttaacatgtggggtactcctgttgttattacttctcactttggattcgaagactttatttgaatggaacggaatctggttaaagctgttattattttatcatccgatggggtgtataaggtctgaatttgtttttttatgcgtgcggtagagagatatcttttgcattggagtttctttttattttcttcgttcctctagtgtcatctgctctgtctaatgatgtacatacgacgttcttattttatatcataaacttccttgtagtctatgttgcgaccgaactgatctatatatagcggggctgaacgttggaaccatggcggcgccactatctatcctaagtggagctgatctgatgctaagattcacttcactgattcgcttgaccctcaaagctctcatggatgcattcaaggttagagccgagagagagtaaaaattattccatcatggtagactggttttcgcgtagctaaaagatctatcataaaaagtatacatccttctgggtcctatgggttttaaactctcaacgatgaagcaggcagttgataacgtagctaataagatgtgacaggagtgacttattttagtcaggttttcacatacaacatgcaggtagctactgttctgctaatttcggggtagcggtgggaagaaccgggcaggagcggttcccagttaggaaggtgcacctaatatttcaggcaaggagtggtctgatccgggtggtctgaccgaagggaagtggtgtgatctatggggcgggtggaggtatgaacaccctctctctctctctatatatttccagaagcctaggtttgcatattgttgagggattcccagaaattgaaaatcgacacctcatccatcaacgcatcaatggcatcttcgccgattgttattcctgctataggatcctcggtcggtacttcttgcggtggagaagattcggatgccaactgagggagcgctgtttgaggagtatagttggggaaaatgtaacggatggcttcgagaaaaatacctcggaagaccgaagagcaggggtgagtgtgttgcatctgttccaagactatcatgcagacctcaattttgttgagacccagacgtcgggaaacgggatccggagatttgcagttgaggaggtggacgtgcattgctgggaccaacagcggtgccctggagtgattgtcagataagatatcatttgcagaagagttgcacactcacgtcatagagcctgagaatcccaacagcttctcctgtgccagactatcaaggatggcattggtctgtagcgcagccatgttgatctgattgcggacgtgggtttgccatgtgtcttggcgagatacgggcaacccttctgggtcttttgttatgaaaggacggtaaaaggtgattatgaatgctcttttgaccgtcagaagcagttaaggatggatatggcgtcagcactcactggtaatggagctgcaagtgatacaaggaaaaggttgcaagtggactttgtcttgtctcctgatcttcgggaattcgaaagcgcaaaatcttttgctcaagggcttcaacctgttggaaagacgaactggccccaaagggttggtagcataaggtgagagtctcccctagaagctgagtgagttgaatcattgtcacccaatagtctgctagctgcggtaggtccttcgggatatatattgctgatatggattcgggtaagccgacaagatcacccaacatatcatccgcagatggcggtacagtgttacagtcattcatgttgatcctcaatggacgacccattgtgagacttagccaacggtctcgaaagaagcagatccaccaaagacggcgccaaagacgctgttgttgcccagtgataggggaattggcgcagaccgaggcagagaaacgatgcagacccattgtttggcaaaggctgatggcaataccaagccaaaaccacggttgggtgtaggtatcagcctcggagtggtaaaatcccatgagaagtgctgattgaaggagaactgtgttgtctgtttcacccccattatgatgcaggcactaagagcaggccattagcaagcataactcggaaatagaaagaatgctagcttgctagcttgcgcttacctttgcacgagcgtacatagattccttcatctctttcctagacgaaaagccctctgatttccaagtatcggccggaagatgctatatcccgcattagcttgactgcagttctactcggaggaggtaggctttacattcgctgcagcatagaaaatgctccatagtaatatcagattgtatggttgaccatctccactgggataaaggtgtggaagtgtcgtagcgtcgatcaccggcataatgggatgcacatgatgaaagtatgcccggagaagttgatcgcagatctcttttcggggcatattgaagcatcctttgtactgcaggtatgctttatcctcggaagatagcgaaacggatgttttggaagtgagcaggatatgccttggtgcaggttgctgtgaaggtgagcatgcatcgaagatagcgccaaacccaggcacatcaccttcagttccaggttagttttgggtgaaaacactcgcgcggtgactacatacctgtgtagaatggcgcttggccaggtttgtagttgtttttccggaggactttggttgcaatttcaacgccagtctgttcttcatcatgactccgagaataatccgggggattagagacactccttatcccaaccagctcagggcggtctttatgcgcaggcggtgcagttgggaatgcatcaagtgggagtgcagactgtgatatcaatccattagaacctgcgctaggtggactgttaatgacagacgcggttcgacgcgtgtgcctttcgcgtatgctatatctgtcagcgataagcttctaccaaatcgaaagaaaacctcacgtttgggtcttcgtcggcggaacactacattctctgccatcttgcgtacaacctatacacggaataccggtaactgtcacgctacagcggactttgcgctgacggcaattctgacaagcagcggccgatctatagcggcgtgtagacatggcgaagccaagtattgatctatcggtctgccgagaaggtcgggtcgccgaattgttgtcaattaaaaatgatccgaggtagccgagatccgtttcttcccgggagttccgaggtaagtttttcccaagaattatgaatgaccctgagagagggaaagggggctgtatttactacgaaaaagacggaagaacagagaagaaaggaagaggagatcgaatttgaaaggttagagatatatcttcagagacttgttagttatataggatgtctgaggaatcgtgacctaggcaaatttttcaaaataatctttaatgagggaaagaaaacctgttgcattcgctagctaagagagagagaagtccaggtggggaagtcaggtcctatctactctgtacctgaagcaaacaacggtctcaacaatcttcaaacaacatatattcaagttaaacgcaaaaagtatctatataccctctatataccctctataaacttctatagtacatcagatcagatttacacaagggcaattccagtaaaggcccggtcatcattggagtaaatcttctccttgttgttgccatccatatcggtccggtagatagatccgcccaggtcagtaagatagatctgagaattggcgggatctaagatcaaaccgattgcctcgttcagatttctggtgatgacatcatatcccagagcggagctagctggcagaaggagaccttgttcactcaactgagctttgttcagtgagttgccgatcgggagttcaccacgatcggtccagtaaagtgtgtgagtggcttcgtgcacctcgagatcaatcggctcggggagatcagccagaacaacctggacatcacttcgagcatctggtgactcgccctcaggggttgtgatattggcgcagaagatccggcctttgccagccttcgagggtcctttctgggtccaatagaatttaccataatttggcaccacagcaattccgacgcaccagtcggagatgcggtgctgtggattcgcttcaccgccggtgttatcaatcaaaacctcgagattggagccgtcgtaggcacaacggtagacgcggcagccttcacggtcacagaaatagacagttttcgcctcggaatggaggactatttgtttcggtgtattgatagttcctggggcaatgagtgttttgatgtcggttccatccacgttggcggagtaaacgcctccgtcgaacttccctggagcgcccatgcaagtccagaacatgcggccagagatcgggtctatgatgagcccatcaggcaaggattggtccttgagaaccacgttctttagcgtgccgtctgcggcaaagcgaacgatctctcctgatgtcacgccgggtttgatggctgacagtccaatgtccaacactaaaaggtcgggagtcttgggagtagaagtcgactcgctagcaggatagaggccacccttcgagcactttgttcccagtttgccctggtccaggtaattggccttcaaaaagtcgaccgtcttctcgggggagagcccacgttcctgcacataatgactctcaatgaaggcgacggtgtctaggccaacatctaggcaatttatgttagcgaacaacttcccacaaaactagggagacgagtgaaggacttactgtccattgtccggcagggaagactctttcccttgatgaacagttcattccacatcgaatcaatttcctcaggaaccgaaacaccctcagccaagatagtcatgacctcccgcttcacagcagcccacagccgattgaagatgaacccagtggactcctttcgcgcaacatatggacttgtggcggcttccttggagcgctcgaccatgaaagggaagatctctggggcagtgtgtccatcggtcatgagctccacgatcatacacgacggcggcatataataatgcatgttcagaacacgcttcttggtggcatccgagatctgactgattatctcagaagatttgtatgatgatgagttggaagccaggatgcagtcctccggggcgagggcttccaattcagcgaaagtggagatcttaagttcgagcttctcgggaacagcttcaatcacaagccaggcgttttcaacggctttcttcatgtcttcgaaggcttcaaaggatccggggatttgctttgttttggcggcgtaggattggacattttcctgaatgtatgcaattccgtctgctcgctgctgcgagctagggtctcgaattcgaacatcgtagccggctgaagcccagatacaacctaatagccgaagtttgtcaacacttctatccattgaataacacgtgggatgggatacagaccaattcggcggccgagtacgccggcacccagaatggtgactgggcggttgcggtagttgctcggaggtacccagtgtgatgccatgctgcgacgcaaagtgttcatcaagtgtaaagtgtaaaatgtaaaatgtcaagtgccaagtatacagggtaaagtgtaaagtgtaaagtagcctagttggtatcttcaatcccagtggcggatgggttccttatatgccctatcgttgccgccattgtcactttgtcatcttgtaccaccctcggaataccagtatccactatcccgaccgaaaggaagatcaaggggacatcggccccgccagcaggccgaggatcggtatcctaatttgatcctcggaaactcccgggccgtggaaatatgatgaacaaggaaattcttcatcaaaagaggatttgtgcaggtggatctacataatcccaaggcgtcattaaggcaatgcttagtgtgtgtggaccaagtcgatctctttcttgggatccactatcttatggaggacgatcccgaggtagtttacctcggaacccatatagaatcccctgggggctaatgccaattagaaatttttgataggatagaaaagaataaatggcgcgtatggttcctctaagactacaatataaagcatttgcctctagttcattgtcgcgctgaaagcacaaccgtcattgatattgcatccttccatacaaaatggcatctttgaaacaattcgaggcgagcgaagtagcagctcacaacacaaaaaacgatctttttgtcatcattcatggaaaaggtaatctttccctccttgagctaccttgttcaatcttctaacacacccagtgtacgacatcacagactatgtgcgagaccatcccggtggtgcggatttgttggtagatgtcgccggtacagatgcaacagttgcgtttgaggatgtcggtcactcagaggatgcatctgagatcctggacacatacttggtcggcaacatcaaggatgcgcacgaatttgtccaacccaaaaaggtcgttcgtgtaatcaagccaatctcttccgttgcggagacacctaagaagtcatcaatcaccctcaaaacagcgagcacaattactgccacatttgctgcaactgcactggtttacgtctgttcgaagaatcaccgaaccctggccgacttctgcactaagcactccccggcgtccctacggatctccgaggtgcgtgttccattcggaaacattctgcatggtggattcttcagtggagtcactgctgccactctggcttgcgcgactattggcggtgttattggaaaccaactctcaaagttcaccaaagtcgactctggtttcaccaagtaccctccccacatgaaagcatcgacaatcaagaagcaagacccgcatcttgtgaagggcttcctagagcccaaagtctacaaaaaactcccgctcgtccaaaaagatcaactttcgcccaatgtgtaccgcttcgtatttcaattggccaatccacgggatgtgattggactcccaatcggccagcatgttgctatcaaagccatggtcaacggagctgctgtctcaagatcttatactccgacatccaataacctggattttggaaaactggagctagtcatcaaatgctacccagatggcattctcacaggccaataccttgagtccctagaagtcggcgacaaagtggaattccggggcccgaaaggcgggatgaaatatcacaatggtctctgcaagaaaattggtatgattgccggtggaaccggaatcaccccgatgtaccaacttatccgggcgatttgtgaagatgatcgtgatacgactgaaatcagtctgatctacgccaaccggactgaagaggatattcttcttcgtcgcgaattggaagcctttgcgcgaggatatcccaagaacttcaagctctggtacatgcttgaccatcccgatgagaattggaaatacggaaagggatacgttaccgcagaagtcatggctgctagattgcctggtccagcatctgatactaagatcatgctttgtggaccaccaggtatggtgaatgcttcaaagaagagtttggtggctgcgggcttcacagctcctagtgctgtcggaaagatgaccgatcagatcttctgcttctagccctggagagtgttttgattacataatctctctttttgtttcatgtttatagatgttgtatattagagttagaggaacttagagctgtttgtgaatttcatatgtttctattttgatatatttttgaaaatgcttcatcttaacttatgtatataagtcgattgcgtgtagattactacttgtagccttattcgattatcccagaggccatagctgccaagttcttctttcatcgatatatttgtttcatacaccatgtcccttgtcatacataggaaattcctttgtacagtttatgatttttacttatattgcggagtgtgacatgtctactccgtaatattatccattatcctttaaattataaggaaaatctctgaacaattacatgtagaaagcactcttgagaaaaagcatcaaagcaagacatcggagtgttaggacatgtaacatccatcccttccaagtatagccaggtgtcacatacgtggccacttgctcttgtatttcttcgttctagacttttcgagaggtctgtacttagagtggagtcggaagagagaataatatcatttcgggatcacatccccatatcgaaatgttccgtgggatcctgtgccttctgtagctggtttggattccgaaagctactgaatagggatatattctgcttagatccacagttgacagctacctagttacctatgttgtccatacgttccgaagatgagtaatgtctggtttacagacggagtgttgaaaatagataaactatattgagctaaatgtattttgcagatcaccgaggaaccaggccgttccgaggtacacgggagacatccgagatagaaaagagccaatcggaaaagcccatttagacccacaacccgaggaaataaattcccgatatatgaaacggccgggatctgtcgtgataaccattgtgcagttgatatataagtttagggtcctgaattgaactggctagacaaaaagcactcaatcacaatgtctgcaaagcaattctatctccttggagagccagtctcctccgccaagaacatcgatgtcgacccgaaaagtgatttgggtgaactcaaggatttgattgcagctcacttcgcaatcgttgagccaaatggtaagtttgaaggacttattctgatttcaggtggtaattactgacgcgtgataggcatcggtttcgaagctcaagactcccagctgagcgaagtctcggagatcacttcagccaccactcccgtcgccatcaccatcgatggacaagcggtccgtgatcctcctggcccgaagggcctcccctatgtcggaaatttcttcgaagtctacccagaccatcttggaaaccaccagcgtctcttcgaacaatacggaccggtcatcaagacagtcaatctgggccgcacgacttatcaaaccaatgaccccgctatctccgcgatcgtttttgccgaatctgattttttcacaaagaagattaatgaggcccatccactctatcctctaaagcagcctagcgctggtgttttccttggagatacggatactcccgagtggagagtcgcccacaagtttttaccgccagctctcggcccgaaggccgttcgtcactatgcaccaacaatgcagaagacagtggaggatgccttcaatgttttcgataaatttgatgagcagggtgaagcctggaatgtgtatcagtatatgctgaagctcggagctcaagcagtgggcaagctcacgcttggcttggatttccaccactttgactctccggacgcgaatttgcatgagatggtgcatttgattgctgaacttctttctctcaataagaaagtcgcatccaagggagattggtatggtaaactgccattcggtgatccacagcggctccgaacgatcaaagacagaattgcaaagatggtggaggaatccattcagaaagctgcacgtggtggtgttgaagacctaccgcttcaagatgcagcgctgacagcgtctaacatggtcggtaagtggctatcatatatcaccaaatcccctgcttatatccatggatgctaataaacgcttcagactatgccatccgtgcaaccgacaataaaggtgagaagctgccccaggaaagcttgatttgggctctcgtcgtcgcaaccgcagccggcttcacgacgaccagttcacttctttcctggctcatttacggccttgtcacgtacccaggaatgcaagacaggctactccaagaactcgttgacaatggcatcgacgaaaacaccgagatcacagcagacgttacagaacgtctcgatttcctcgataagtacatcaaggagacccagcgtcgccacaacccgagtttccaaccgggacgaaccgctaaggtcgacctagtgcttccgggagggtacaagctcgccaaggactcggttattctcccggcgctgcaccacatccacaacaaccccgacctgtgggataatccttaccagttcaaccctgatcgctgggacaccgaggcggtcaagaacagacataaggctgcgtatattccattcgccaccggcccgcgtatgtgcattgggttcaactttgccttgcaggaagttaaggttttcctccccaagctcatcttccggtacaaattcactcgggagggcaatgaccccatcgagtatgaccccatgttccagttgattcgccccaataacctctatgttcgtgcggagaagagggtgaaatggcctcctaagacggagacattggcaacagcggatgtttgagagcatcctagcatagatagatgatagatgtttaagtaacaggcttaggcaacagcaattggtttgagaatagaatgtatatgagaatagagaatgtatatattatctcgtttataacgaagaacttcccgtctagcaaagcaaaggtttttcttgagatgtataaaagcgattttatccgaaattctatttgactggaaaatagtatactcgtggcagacggtctttgcaagatgaagcatagctaccaatgaccgcatgagattgaaggtcttgataaaatgcagtgaagctataaacggatattcattctctcaaaagacaaagtgagggagatggaggcaccgtagatgtcacatattcgaagattaaacccgtaagatggatacactagaaaagaggtataatgaaacggggactaaaaggcaccaaaccgaaggcatgtgcaatatagataaaaatgcccgaagaatcctacctggcattcaaattgcagaaaaatgaagaactcatctcatgtcatcatcttcttttcatcgaatggtacaaataacaagattatggatctgaagtagtaggctttgactcagatgattctggtgcgtcatttgctggcttcagcactgtgctttgcgggcgccacttggtgaggaccttgcccgcagcaggtcgggattcctcgtctgttcgtcgcatgttagatatatatattaccagtggatattagggagggggtatatttacaagtctggtagacatcctctactgtgttcaagcacatctctcgtgctggaggtcggaacataatcaggtacctaaaaggaagtcagcaagggagttcatgatagtggaaaaagtggaagacgacatacatcaatgattgaacgcaaaggttcacacgttccggatctttggccaagctggccacccgctgagtgataggaattgtgatctcagggacttcactgagaaagcggaccagcaccttgatatctcgagagtccaaataagctaggaaaccatccaaaagtcgggtggcccaggtatcgtagttaagagctacagtcggctccgagtcttcctcggtgtcatcccgttgattggcagcactcttcatttgaattcggtcattataccactcttcattgagccagataatggcaatgttaagtcgccctcggaaatcttccaagatgaaccgatagagcgtttcgcggatcgagtcggcaatagttgtttgcctacgtacggcgtctcccttggttggctggtcattttcgagaccggcaggtgcccgtgtagccagccgagcaagaagaacagaccatgcgtcccggtcaaatgtactccctgctaatctagcgaaaccgagcttttgttggcttagacccttggcaggcgcaggcgatgtttcggctgcgttcaacattccgaacacacgcgcaacagcactccgtccgatttctccagcctcttcttcgctcaatggaggtggttgtggcaggacaaagggacccaatgagaccaattctggttgtagatctgctacctccgccgcaacagcactagcctcttctgaaataacagatgctacgtccatgggctggtattcaggctcatagtcatcatcctcatcttgggctgctgctctctgttgtagctgccgttgcaagttttgatcctttgtgattgtctgatatcgagtacgaacagcctaggtcatgtcagcaaaggataaggcttcactcctatgaaggtacttacatcgacagcttgtgcaagtgttgaatcatgtacttgcgacaagagcggtacaacaatcttgaggactagatcaattggcagctgttttacgtcgaaggaggaaagtccggtgtcctcggtcaaggtgaagagtcggtcaaagcttgcaggccccggtgccattggaggaatcttgagcatcgggggaggcaaagcatggagacgcgccctcttagcgttgtcaagtccgtcggtaggttcatttggcaatccacgtttccgcgaagcgtcgtcagtggcctcaagtcgtgattgcattagacgttcaatgtacatttgcatccgacccgctaaggggtggttcgggttcctatgatagtcaggtcaaaccacatctttcgcagccaggatgacaacatactttttcaagatattgataagcagagctcgagctgtgcgctccatggacttgacgctgacgcgaattgttggagtaaacggcgcgtggacgtgtttcgcgggataaaactccaaaattgtgttaattatcttgtttgctacggactgacgtgtccggatgagaggggcgaggcagtttaatgtcgcattcacaagaagagcatcactggtttgtgttagcatcttgatcaactcgtaaaataaattgatcctcatacctagtctcttcttggaaaacgccaagtagtcgatcgagaagacctgaggattccgcttccaggttcggtattgacagaagagcatgattccggggaacaacggccaaagacgtctcgttctggtccggtcgctgattgaagttagtatcgacacatccaactctgtataacccgccaagcatacccttgggtccgagatcaatccaggcgtctgaacctggaccacacgctggatgaacttggcacagcaaagcttaaccgggcatggaaacgagtccattctcctaagtatatcttgcttaatggcagtcattgtctcccatgacttgctatcctgtggatggttcactctgtgtattgttagctctgcacgaggtttacgtttgtaacgcgctcgtgcgtcgcagccacgaaagattgggaataacctacacatgtctgaagacaagaggatacaaactagctgaagtctgtaccaagctctgtaggactgtcgtgtctgtttccggcaactctagaatctcgcggatggtctgtaggacattcggtgccagctgctccttctgcgcaacagctaacattgggctagcaaaggtttctgccaggaagtttgcaccccatcttcgcaattccaaccgtgtactagctccgacgatgggaaggataccgttgacgatctgcgggtagaaggcggcatcgccgagaacgagactgcgggcggcattgagctgggcgacctggtcgatgacattgtccatgggctgagccattctagctctaatgaggaggtatccggtacgcaacggacgtgtcggattcgatttggtagactaggtgttgggggaagggaggacgttgatgggtggatggagaacacggatgcagttgcaaaagcaacgcgcataagcttgggtttgcgttctcagaactaggaaatagcggcaaaataactccgaagttggagagtgttagtggttatgcgatgggtgctgaaggaggggcgattgggaagtgaagttgatggtcgtcaaagatgcgacaaaagctgcgaggcctcaaaagggcggctaacaaagcctccgatgtatgtgagctccgtatctctacataaacttgatgcaccgagctcaaagtctctgtatgcttcaattgcttggaatttaatacagccagtgtctcaattacaatcaaaagtctcgatctaatctcaatacaaacatctaaattcgcatcacgttgtctgggcctccaacgccaagacttttcctccggatctgccttctatgccctcaactttcttgtctctcacgtctctcttaacaaacattcccaccatggctaccggaatgtatgtatagtgtctatagactcagagaggtctcatcttgctaacatcatgctctgtgccagcttcaactctacctactacggcaaggactaccgggccggtgccgccctcctgcgcgcccgccgcccatatctgtttaagaataccctcacaggctttggattgttcgcatttacaattgcagtctgtgagtaaaccctgtgtctgataccgatgtttttccgcttcagcgctgctttatctccgaaccgcagacgatcatgccaccaggacttggccgctgagaagcgggctcgatatctacaagagacaggacctcatgctaatacggcttctattttcagatacatacaccctcaaggctgtcggccaagaagactttgccgatgtcaaggtccccgatgcccccgccgacaagaaatgaagcacacccaacataccggtacttggggatcggttaacgctgccatcggggttttggagtcttcagggagaccttgtttttcagatctgtaggattagcgataatatcagcatttgtgctgccgtgcacagaaggaatttggaatataggctgtacaatgaatttcggctacggatgttatttctatgtgccctaccaactccaaaaagaaaccccgacttctcctcgctactccaactctgaatcgccaatgtcacgtagtgaaggtgacaggcagagttatttaatagccttctgagaagaaaggcattgatatataggttaggtaactagacctagagtatattggtatggttttgaagcatagctatgccagagcgaatcacaacagccaacaagacaagaaaactcaacgtgaatctagaaaacaaatctctactcggttcgcagaacacgagggcccttgtgcttggtggcacgcttgcgcttgaggcccttgtcgaaggcaactgcgttgctatgatcacggccgaggttatccaggtccttgaccttgtatagacgaacgatccagttctcgctggtgaatgcctcttccagtgtgttgagttgtgggctctccttgggaagttttgtgttacggacacggtccatggcttgaccggccgggaagagcgactggaagttgtgataagacatcttgtacctattgatggggttagcagtaacttggataattaagatgtgaggttcttacatcaggctgttcttcatggcgggagtggcttcttcgtcgacacggtactcgccacgagcggtgaagtagtcacgctctttcacctcgtctggccagataccctcggcaatacgaaccatccagaggaacttgttcaaatcgtcacctgagtagccgagtagtccaccgaacacgaccaagacgtagtcgacatcgtgctgtcggagaatagggtagctaacttcctcgcgcgagctcattgccttgccaacagtagcaatatgggtgttgttccaggtgttgttgtcgaccagggtggggcggtcagccataccaccgatttggtatccataatcccaccaggacatgatcttggcattgtccggggtgttctggcggagccaatagtaggcctcacggtagtcatcgatgatgaattggcttccatctggaagcttgctagccagaaccacagagggagaggaatatgcgttcgaagtaacccaggtgcagtgtgcaacgaacagaagcaagtaaagagtgaccgaggctaccacgacagacttggaaaaccaggaatagataccgacaacaggattccgggttgaccgaagtgacttatcatccgtagttgccttagccttggtttcagtgctaggggtcgatgcaaccaggaagttatcgaggatgcatgacaaggccagagcagccgcaacacacacaatgggggtcagggtgagcatcagacggaccataacaccagcgaagtaactagcaaggacggagtagatgaccacaaagacatgctcatccttgagtttctggaagcacatgaacactccggccgggaacagccagatgaggaagttcaggtcaaagaagaaggcaggccaggcggtgggctggtgctcggagacggaggcaataattgggatatgaatcttggcatatccggtatcccacagagagtagaagcgaccactccagggagcaattacccctgagattgatagcaggacaagaccaccaaatccaaggccaaacgtaagtaagaccatagaagtgaggagcttctggaactgcttgccgggcaggtagcctcggatgaactcagcaaacgcaaccaattgaatcaacccaaagacacctatcaaatagttagaatgagacaacgatatggcttagaatccaaaaaatcttaccaagtgcagacatgtggtcactgttgcgaataggcaggaaaccgacaaaggggatctgcatgcttcccaatgttcccagggcgtaccaggtggtgtagctgatgtagacacgggtgctgtatcgtcccatgcacagaagaacaaagacatgcagagggatcaggttagtaatgaagacgtatccaccccaagcagaaaccatatatccatagaacaatgcagtcaaggctccccacatgatcgagccgttcttcacagccttgatccagaggtagaatgtgaacaccaataggaaaatggcaatggcttcattatcgtagctgcctgccacagaccgtgagatgtaaccgggtgtaattcccatgaaagcagcggcgagaagacctgcggaaggagagtcggacatctcagaggtaaggagatacatcgccagggctgttagtccagagaatccgggggcgagcatgacacagatgtttcgaatgtcgacggggatggtgaggagacgaaggatgtggtagatcacgccgctggtcaccatcaggccagggtacaatgtgccaccagtgacacgcccaagagggtgccatgttcctatagcacgagcattcccatcagcccaatgtcatttatagtatcatgcggaggacgtgcaatcacggggaaggggccttacggtcatcaaaccaatcccagaagctataaaagccattttcgatcaagtattttgtcgcacggaagttgaaccacggatcgactagagtaagacggtatcaatatctcgtttgtttcgggggttatcgaggtggccaccgcattcagtgcagcaacatagggaaatcatacattcgtggatgatactttcaaatcctaaaatatagttagcatactgatcataaaggaactcaattgggacatactaatgacactgaacaagcggctggacaccgcggcggcggcaatggtacagagaatgataacccgcaatagaccgcgcgtattgcggccggagctgcctttcaacacaacatcaagcgaagacggggccatgatggccttgaaaacggagcgaagtccagggtcagaaatcaaaatagaaacatgaaatcaaggaatgaattgggctgagatgccagtggtgagggccgtggagaaggatgggaagagcaagagctgcgcaaggtggtcacttctgaaggtcttggcaccagccaaaggcgccacctccgattgctccccgcaatactacgactcatcactaatatttgttagagctcttttgactagattttgactcaatatacttgccactattgggtacatcagtattcctacagccatctacacttcatctacacctcacatgcccacatggagctgcctttgctgaccacggagcatctctcaaagctagtggcctccaacgctccaccgtcccaactcttcgaggccctgtcgcgatatgagcttcaagcatgcctcatttctaccaggggtgacagtgctaacacaggcggtagtgactctacactattgagcctattctactcgagcttctttctcatccatcttcttaccgaccaagtgttagttgcttagcgagtactattggtagttacgacactgctaatgaagctcgggtcccaggtctgaagctcgtgccttaacgaaacgaattcctgaagcactgctgcaacaggatccttctctacagaactgcttgactttactgcgagcggtatggcagactcaacacggccaggtctaccaggtactccgaggactaccatggccagacgttttgcagccattggttcggagatatgagagtatgtttctcatcgaaatgagcttcttctttccgctggatcttaaattgaccaatgattctgcaattaggtttcttccaagacaagactttgatcgcagtgagcagatcctacgaagctatacgactagcgacagcagcaacccaccttggtcttgaccaaaatcttgccaaagaggaagatccaaacataatatcgaatttcacgaaatatggatggacatgggatccggaatcaaagctgctgtatcccaaacctatcgttgtatcgctcgcggagcctcagtcttccaacgggatccataaggcaatggcaatgctgggaacgcgtgcagggtaaatcttgcttggacaacgaaggaatgtcagttatttggtagatccaaacctggactacaatggctacgtcctctgtcctacggtggggatgcgaggaccgagaggaacgctaaaaccaactttggatattggtctgatacatactgggacaaccggtaacgccggaatgtaacacgatcttttgctcttgcttgtggtccaactgtagtgtacaggcgcatggcagcccagggtatgtacaggacccagataaaacgtctaaaaatgagaaacaaaaaatcgttccatcttgcgctcgcaatgccacaactcggggcagatcaaacccaaacaatcgtacaataagatggaactgagttgagcaaaacatgtctaataccctgggggaggtgcgattcccgcaaagagatcattgcatagcattcctcctctatgccatccatcatatttaaaccttagccttcaagaaggcctccaggtcgaacttggggtcctcgaaattcgtgataactatggagttttggtcagtacttcgggttttgaagatattcggcggctccggatgtcgttgcatttgtctgaattgcatcatccgaggggaatcaaacgtacgtccgctggtctgtgtcttggtctcttgctggggctgggtcttcttcttgtattcggccttggcctgctcgatcaggcgctccttgcgagcatactcgtgctcgatctctgcgcgcttggtaaccgagttgagagaggactggtggtaaacaccgtaaacgagaccagcaacgagagccgagtaacggaggacctgtaggttgggagacgtggttaacggccgtcgggggagagggtaacccttagccggtactcacattgacaccttggctagccatttctgcgaggtttccggaagacgggaattaaatgagggaataatgtgtgtaagaagaaggaaccgtgcaacaggtgtcaaccgtcaatggcaataaatctccaggttggttaaatggcgaggttcagttcatgttctgcgcgcgcgagtttttccggaccgctccagagttcccgaagacggagattagtcatccccgtaaataaacgcgcagtggaggtactacacttggacgtggacgcatctggtctaaccctctataattgtacaagatgtcgatgcaacagcgcaaggatgaaattctcgcaaagcgggccaagcttgccgagctcaaaaagcagcgggagctgcgccagaaggaattcacctcccgaaccagcgtcggggatgcttcagaggtaaatgcggcatgtaaatgaactacggagcttgtccgggtctaacaaccttcctagattatctcaccgataccaagccgcgcagagaatagacacgatctcgatgacttgatctctcgcttggtcgaccgcccagcgtcggcctccctcagccacggcgtcgatggcctgtcgcggagaggaagtcggccaacctccgtgttgagcgcgagccaattaagcggggagaatacagatacatatgcagctccgtcgcgaccacaatcccagtccattgccgtccagacaacagatgagccttggatttcatctgcaacggaagccccgcagccccctgaacttgaacccgaatacaaatctacacccaaaccggaagttgtcacctatagcaaagctgtgcaaacagacggactagatctccagcccgagacccctgaagggtctgtcgcttcggatgatgaggagtcgcccgatactgcgcggtcgagcaagcgtctcagtcgacgagaccgggagcgggacgaggaaatccgacagaagcttcgcaaggaaattgaggaagagctccaagctaccagtcagaccgataataatgagaacacagctgcacagtcggcaaagctgcgatatccccttcgcaaactcgacgatgacgaactaaaggcagtcacatcatcgaacgatttcctagactttgtggagcgctcttcaaaggtcatcgagcgagctttggacgaagattacgatgtactggcagactatgagctgggtggaactgatgggcatctgcaagaagatgaggagactggcaagaaaaggagaggagtgcatgaagtgtgtcatttctgggacgaacgatggagcaagaaccgcattatcagtgacctaagcttctctccaaaggcaagtttctacttccaatacatgtgctttggctcatgctaaccttaacttcagttccctgaattgttgcttgcgtcatacaccaagaatacttctgctcctcacgaacccgatggccttgtccagatttggaatcagcacttacaaactcgtccggaatacgtgtttcactcgacatccgatatccttacggcaaaattttctccctaccatccaaaccttgttgttggaggctcctattcgggacaagtgcttgtatgggacactcgttcctcgcgcgccggtggaggctctccagtacaaaagacgccactatcgggcggcggacatgcccatcccgtttacagtatctcgattgttggcacacagaatgcacacaatatcatgaccgcctctacggacggtgtggtctgtggttggacgatggatatgctctcttacccacaagatcgtgtggaactgactacacctcccccatctaagaccgaggatctagctccaaccaccatgtcattcccccacactgatccaacgttctttatcgtcggtactgaagagggagtcatctacccatgccatcggtacgatcgggccggtgccaagtcgggcacagaccaccgtctagcctacaagggacatacggcaccaatcatgtctaccgcattccaccccggtcgtggacccgtagaccttggcgatcttatgctgagctccagtctggactggagtgtgaagctctggcgtgtgcggccacctgcgacgactgcctctgccacatccggcatggcccaatcgcaagtcgtctcgcccatactcgacattacccgtgacgatgttgtctacgatgcccgctggcacccaaccaaacctggtgtgttctctcttgtcgacggtgccggcaacgtcgaagtctgggacctcgcttcagataccgaagtgccagtcgcgcgtgaagttgttgacaatacccatggcaacatcatgtcccgaagcctcaacaaggttgcgtgggacgaacgtgaaggacgccgcctggcaactggtggcctcaatggtgtcgttacagtctttgaagttggcaagggtctgtgtggcctatcggaggaagtgccggcggacgaatggatgggtatgaagcggcttgtgggaaagctggaacagaaagataaggatcgagtggcttagagttaccactccaatggcttgtgtcttttccgatgattgtcgatgtagttttcttctgcgggccgaccttccccgtctacctttttccccgcgaggcccccttctttgccatatacccccttcccttcggtcacataatttgtgcatgtgtatgtatctcatcgccattgcaaacgtcatcatgttcctggatccttatcccctcttcatctccaactggacctttaccatgaagatcgtgaagactaataataataaaaaatatgtgaaaacaatctactggcagactcaagatcagacaccaccttgggggagacgttgctgccaagaatgtttccccgatgatactcagtacacagccaagtctgcagatttggtatcttaagctagtcaaaccttcgtcattgactatttctttactcttatacaaatatgatcacaacttattgtgcgtcttgaagatctcgaccgacaagatcgaaccaatagccttggaaggcaacgaataatacatgaaaaggctgtccatagttcccttctatccaggattcgtgaagacgtcagcgtatacatgtatgtgtctattcttgttcgatatcaaaagtttcaatccatccattggtggataatatcgatctgcaatgccgagatcggtgcgagattattcataattctaaaaaccttaaaacccccgaggcagaacccaaaagagaaagcaagccaatgtggaaccagaccagttcacgaccgtttgcctaaatcgggaggtaaccaagcttctggtaaacctaatctatcccatagctacctcatgtacatacgtatgggctacaatttccgcgtgaaccaaagcctgtcagcttcgatatttcacggacatgttcccgcaataggacatgtcatgatgtcacattatctggcttcgagggcccctttgagccatttgggagcgatctcgaggcgagatggaggatgagaaagggacgaatccacgggtagatttctggaagggctcttccaagatatgttccaaacccacagagtcggttcttgcgttccatggaagatctcaactctaaaataatagagtttcaacggccatgcgcctagtgttgatttgaaggaacaccactcttgctatgtgttctccattttaaacgtgttccaatggtcgactacggcccttgcctcatatgcatatatctccggtgggtgtatttcggggatttaagggttcgttgttgaagaattttcttatttaatataccatactgtccatttttcctcgcccggttatagaacatagaatttcctacagatgaagatttcaatttcccttccctcgttatcatgggtgccgactggaacccgggtggccaacaaccatataatggcaattccatagtgggagctactgccgccattgctgcggtgcaagttgtcttcgttgcagggaggttctatactcggtttatgcaacggatgaaaattggtatcgatgactatctgatcctacttgccctggtaagtcccgctcggagatagctatttgaatatagtcatactaatatctctgctatctaggctacaagtttggcagaatcagtgctctttattgtctgtaggtgcacggtctcagcacccatctcgaagaacaacgaaactcacatatcatgcagtggccaagatcggcgtagttgggtaccacttcgactacgtatatcggatgcctgataaagtggctctcacgagaaaggtacttaccccaatcctttgatctctgagaattgcactaacgacagcatctagtgtatccttgccttcgaagtcctcgattaccctctcaacatcaccatggccaaaatggccctattatgcttctatctacgcatttttacaacccgaaagttccagatcctcgtctacatagtgggctcacttgttctcgcggtgggagtcagcgttcttctggagaatttcctccaatgtcgaccattcgcgtacatgtggaatcgaagcatccccggcggatcgtgcatcgatccagtcgacgcttatcggattcttgcgccatttaatgtcctcactggtgtgttaatccttgttatgccaattccgactgtgtggaaattgcatacatctagaaaacagaaactggccttgacgggtgtttttctgttgggtggactgtgagtgattcaaactttgccatcatctgcgcttgaaataaatacatagtattgatgggacattagaggaaatgtggccagcatcttgagaatggtgatgtactttgccgaatcaggtctcgctaaggaggacccgacgtgtaagaaccaatcccggacttggatcgaaacgaggactgatctataacaaactagggttcgcggcgaaatttggtatcctaacggtcctcgagggaggtttgattatcatcgctgcttgcattatcagcatttggccccttttcactcaggtcatgccacggcgagtcatgccccggcgttttcacacaacattctctcgctccacctctcgcagaactcaacacctggcctggtatttgagaagaatacccacaaatagtgaaagccaggaaggcattgcgcgtcctaaagaggttagtttgcccaaaaaaaaatcttggagtagcttgccgtccttgctttcctcgccttcctcgttagcagatttggaggatcagagatggtcaatccttatggacgaggaggtgagtggctctcataaaacggttgcggggactcattaataaaaaaataatttctatctcttaagtgtataatgaatgagccaaaaatggaattttagaagccccccataagtgtaccttggcttgtcgtaaaccagaatttatctatatatcataacatttgaaaagctttgaaagcggtatctgtattcaatgaatacgggttttgccgagttttcgtatttgcatttggtcagtaagtgtatctgaagccagacttttggatttcattcgttagcaagatataatcggccggccattgatgaagcacactcactacaccctcaagaatctttaatcctcgcttttgctgtcgattgacaatgtaaaagtaaatcgtgaatgcgccgacgatggcaatgagaagaatgtgagacctggtaatgttgtcagccgaagtccaatgttcaataatttctgaaacttacccaattgacacccaaactgcggtctggtattgcggggcttcttgctggcggacaataaagctgcctgctacacccccgagtccgttacacgcagtgaccgccgccgcggtggccactcgtttccactggccgacgatattgttggcctggaaggcattgagggcagcccagttcgagatataagcaccggtcgccagaaaggtcccaatataacgcactgccacccgggtagatacgggaagaccgaacatcaggaacccagctatgaggacaagggcattgaagatgatcagcggcccacgcacgcggtagaaatctccgatcagtgatgtgagaataaccggaattatggcataatagtagggctaataaagaagttagagaatgcggcgtttatattctggatcaacttaccggtgtggagagcagaatggatttatttgagctgaaacccataccggactgtaagatgatgggtagaaaatacgacaaggcagtcgatatgagattgagcaagaagaacatgatcgcaaagccgtagattttcggatccttgaaattagcaagaagcgtgccccaggaaaacggttccgggataacatcagctcgatcatcctgaattcggcgcgttgcgaggcgcgcttcctggtctgaaagaaagcaaaagctgtgctgggcgttctcggggaagtcgaccatccaccagtaggtgataatacccaggacacaagtaatgagaccctgaacaacatacatccagcgccaacccgccaacccggccacgccattcagatgattgagaccaaaattgacaatattaccagtcgcaagaatcacaacttccccggactgcaagaatgcaaaccgaagctgctgctcttgtcgcggataccaggcgctaaccaggtaggtcagaccagggtaaataccggacatggcgataccgagcagcacacgcaggataatcatctgctgccagttgcgcacgaaagcagtgcatagcgtcaacagcccaaaggtgaatgtgattgtcgaaaaccagattcggggaccgacaaagcgaactgccactgtgcacggcagctgaaagatcacactggcaattgtgaaaataaatatggagacagagaaccggttgccctggcccagatcaagatcatccagcatcgtcgtcaccgatgctgaggacaaaatgcccgagtctagcaaattgagactgcataagagcccgccgatgctacacaggcggagatcgactttccatcgtacccgcttctctaaagcggcccactcgaccccgcgctctgcgttgagcctgttttgaccatcttcaggaggagcctggtcgaatatcacgccgtcggactgtgcattggtctcttgaaccactggatccaaggtatgcaggtcttgggccgttggtgtcaaagtgaacgagaattggcccttctctgaatcgaccatcttgactgagtgtctgaaggatcaggccaatcctcgatttccgtaatcagatatgtcgcaagttaagttgctaatccaatatttcttttgttttttcctccgacattccaggataagaacgtgatagaaaccggccgagtagtgcgtctcttagcgcgcaagtcggacctagtcccgaggtcggattatcaatccagatatttcggagtatttttctcatgatgtggcagtttatagggtgcaggcaagccagtctatgatcaatcacccaggctagtacggagtagacgcgtacatactttgaattcccacagagagcatgtgaccgggcacattccaaattggccctccgtgagatggcccctctttcccacaatatatattgcacgctgcacgggtaaattccgaaaagtcgcatacatggaggctttaacccatgattgaaacccccagtttacgcttattttacctgtgattacaatctaccgatgaatcgtgtccgtcacgaatcaaacgaccgatgcttcggttgcagcagaaaatgcgtttcttaaggaagaaaacatccgacttcaccgactcctcgatgctacaatactatctcaaaggaaatacaggaggatgttactgaatccataatcaacctctggtccgaaacctgtttgatcaacagggcccagattagaaatgccccgaggtcataggcgacaacttaaaagccacaagggatcgcatatatacgtcaaggagatcaatcgaaagttcgagggagcagacgaagaggcaaagaagcaaatgggtaatatgagaaaggatatggaggcctgaaggaagaacaagtgtgtcccgaatgtctataaagatatcaaaagcgggtatggagagttcgagaaaagatatggaaggttggaagcagcgtatggagacctgggtgaatgatatggacgtctcgaagctcgggggtttggactggaatggaggctatggagaaggaatttgatttaatcgacagagatatttctggcagcgaagctcgtgcttaagggccagagcaagataatattgtgcggcactaggggaggttacattgtccattttgacaaaggcacgctaattgattttctatctattattactccgtactatcgcagtactgaaaggattccaaattggccggctgattctactccgaatgtgccccgggctgacagcttacatacaggatgtggaatggaatgtggaacttccgtggaagcgtgagtttcttcaatgagattatcatgttcaggatgcctatgttataggcgttcttctataagatccgaaagaaccaatgggaacaagaagatttaagttagagctgcagttagcgtaccgattaggctaaaataggaaaacccaaaccaactaaagacaacatgcatctgtaggtacacatcaaaataaaataataagccaggtacaacggaaattgagccatcaacccgattgaaccacgggacgctgtaagctttgcgggcccggtgattgctctgtttgttgccccacgttcggtcgaatggagcccggggagcttgcaaaatattgccttggacttcccccacactttcgatttcctctctctccgcatttcataactaaactacacacccattatggtcgaactcatcaacccgcccgagactcgcgaactactccctcccctcctcgcatgcctccccctggcctttgtctcaccccgcgcacccccagctctgttaccacttctctcccctatcctgcgccaacgagtcggggttctcagttcgctatccacatcttccaccgagtcatggctgcaacttctgtgctgggaggctgggaaagcagagcgtctgcagagggtcattgacggtgccaccttcgaaccacaccccgtatcgggcgaaatcgagcttccggatgaacttccggtcacatacaaacggatcgacgatgagactctcaaagcacaagttccgctcgccgaatacagcttgacggtggtctatttgtggtgcccgacagacgaggagggaggtggtcgtggctggcgagtcgcagagcttttgccgcgggagggagctgccgaggatgacgataaatgggcttcttctatctgggaagcaaacgttcaggcaaaggaccagctcctgactgatatattaaaggctgccgaggaagagaaatccccggagaacagcatggagaacgacgacgacgacgacgatgactactgggctcagtacgactccacacccggagccaagacacccgcaccgcctgctgcttcatcaaagccgggtccatctcacttgtctgagcagtcatatttctcgcagtatggcgacgtgcagccagccatggataatcatgatcccacggaggagcaacccgaggttggtccatcatcgctcaacggagatatgctggccaatctcttgcgacgacaggtgaacggagtcaattcagatgacgagccccgcaagaacggatatgccccagaccatatccccagtgataaggctgcgcaagatttgaaccacccacggccggcctctgcatcttccggtagctctgatgctatcgctaagctggaacacgaggcagagagccggtccacctgcgaggtcggagtgaaacaacatatcggtacgagcatcaagagtttgttccgtttggcaaaggtcactggaatgtcccggggggagttccaggcattggtttcgatggaattggagcttttggatattacggatgacgattaaggctaaaatacttgagtgatacccatgaatcataattttgcatatgttggccataaacatcattgggagtgaatggtttgctttgggcatctgatattgttttaaatacataaaccacaatgaacaactccacactaccttaaatcctgcacaggtgacgccatctcgcattgcatgcccgattaggcgtagcgcatcccaaaaaccaaccttcgagagaccatggatgctgcctaaatcgatgtacatcgtatcgttctaaccaattcaagcaattggaataaaccttggaaatgtcttaggctgagctcaccccgccctcaaacttaaataagagttggcccccataagacgtttacgagaagaaccagcttatttctctttcactcatacacaatgcacgatcaaaagaaccagaatccatccgaggacagaggacgctatcatgaggaagaggcagcagatcagcctccagcatacatagcaggacccgcaatacaaccaagccgatcaccagcacaagcccctcatcaaacaagccacaaaccaatcgcaatcccagccatcacctcgtcctctgattctcctttcatccgtgcatatgcacccattctaagaaaccaccaacttcccaaggaatcgtttctcagcttcctcgaccaactgaacaaagacatagctgccagtccgcccctccaagtcctagatgcaacgggcgggatcttgaagtcggtcccgatattattcccgttgcactggattggcggtgtggtcagcggactcgcaaacatgggcagccaaggcatgtccaaaagccgaacggactcctccatcaaacaagcgaatagggacatattccgtccgcgcggcttggaggttgaaattgcgaaactggatgccctggcacatgtcgcaaagctccctatattggattctcaaggcaaaatcgatcgacaggcgcctctgtttctacaactccaggatggggtgtccatggcgaaccctgggaccgatgaaaggcagcaacaggaacttgatttgcagcagaggatatcgactttgcagccctggattgctgagcttgaatttgatatcttaccttggtcttccaagtctagattgacccggttcaacgcctcgttgaagaagtataatgagccggaatatcaggagaagagaggcatgggtaggcgaggcgatgtttacatccaagagacaccacaggaagaggctccttttaggaaggctttgtggcttgttattcgggaggttgagacggatgaaagacgttaatatgtgaatatatatatatgtgcagttcaccgtctatattagacttggctgaacttgacaaggggcaaacaggaagattctttgtcaactagcaatagtaattttaacgagaataccagaactttaatgcatatatatctgtccaattagatgccagaccaaccaacgaaaaggtggtcaaaggaaatatcacatgtagccattgcgtcgtcatgaaaagactgatagcacaccacacttgtaactcccaagggtcaatttcttgtatgtaacctgtactcgactctcaaacaaggagttggtgctcaaagtacactttttgtggatttgtatacgtagatcccgcctggggccaccgccctgccccgaaactaaccttggaagaagacacgcaacgttctactgtcatccccctctacatctcctttcctttctcatagtttacttggcctcaattgttgggtgccatgcttatttggtgattctagtaagcttccttttcctctctattacaatttttttctgctttgttgatgtttactgacaactaccgaagtctatttggctataggtagtttctcggtcgctctctacatttcatattttcaacatgtcgtccccttcgccctctctgcggaagagaggcggaaaaaaggatgtttacaccgcattgccctctgaggatggcccggcccccgtgtcggtgccggtcaaacagaagtcggaatgggactattggctggccatagtgattcttaccctcctggcttttgcgacacggttctaccgcctcgatttccctaacgaggttgtctttgatgaggttcacttcggcaaggtatgaagtcgaataccttttgtagcggcacaatttatgaaaaagggggccctttgactgacattgaaattactcggccagttcgcttcttattaccttcaacgtacctatttcttcgatgtgcacccgccttttggaaagctgttgtttgcccttatgggttggcttgtgggctttgatggaagattcctgttcgagaacatcggcgactcttacatcgacaataatgtgccctacctctccctccgtgccatgccggctactctcggcgccttgacaattccggtggtgttcctcatcatgtgggagtctggatactctctgccagcctgtgtgctggctgccggtctgatggtgtttgacaacgctcacgttggagaggaccgcctgatccttttggactcgaccctcgtgctgtcgatggcgctcagtattttgtgctacgtccgtttctacaaattgcgtcaccaacctttcagccggaagtggtggaaatggcttctcctgaccggcttctgcatgagctgtgtcatctctaccaaatacgttggtttcttcactttcgtgaccatcggcgccgcagttctcgttgacttgtggaacctcttggatatcaaccgcgagcagggagcactgagcatgatcagctggggcaagcatttcatggctcgcgctgttggattggtcattattcctttcatgttctacttgttttggttccaggttcacttcgctattctcaaccggtccggccccggcgacgacttcatgacacccgagttccaggagactcttagtgacaatcagatgaccgctcagtccgtcggaatccaatacttcgacaccattactatgcgccacaaggacactaaggtcttcctccacagtcactgggacaagtaccccctgcgttacgacgatggccgtatctctagccagggccagcaggtcaccggttatccccacaacgacaccaacaaccagtggcagattctgccggccgatcctctgattgatccatccgagtccaagagcgtgcgcaacggcgacatcatccagctccgccacgttggaaccgagagttatctcttgactcacgatgttgcgtctccattattccccaccaaccaggagttcactacagtctctcaggaactggctgagggcgagcgccacaacgataccctgttcgagctcaagatcgagtcaggcaaggctgcccaggagttccgtactcttgccagcctgttcaagttgatccacgttccaactcgggttgctttgtggacacacacaactcccctgccagaatggggttacaagcaggccgaaattaacggtaacaagaatatcctccaatccagcaacgcgtggtacgttgagaacattgagaacttggaagaggatagtcctcgtcttgttaaggaggagcgtaaggtcaagacactgcctttcttacgcaagtactttgagctgcagggtgccatgttccaccacaacaacgctctgaccagcagccacccctatgccaccgagcccttccagtggccgttcctgttgcgaggcgtgagcttctggactaagaacgatacccgtgagcagatttacttcttgggtaaccccattggatggtggattgctagcagtattctggccgtgtttgccggcattgttggtgctgaccagctctcgcttcgccgtggtgttgatgcattggaagaaagtgagtcgaaaaaccaaacatcctgctcttatccctttttttggttctggcaattaacacacgttcattagtttggggtcccggtacgcgctcgcgtctgtacaacagcaccgggtttttgttcctgtgctgggctgcgcactacttccccttctggctgatgggtcgccaacgcttcctacatcactacctgccctcccacctggcctccacaatggtttgtggcgcactggttgaattcattttcaacctgcagccgctcgatccccgaactgcacttcctcctgtcgatgatccctcgggcaagtccaaggcacggtcggtcagcagcctgcgtcggttcatcacggccaaggaacgcatgggctgcaagtcgctcatcgcgggctggattgccactctcatcattctggctgccaccatctggggcttcatcttctatgcgcccttgacctacggtacccccggcctcgatgtggccggtgtcaatgcgcgcaagtggctcaactacgacctgcactttgccaaataagctcgtcgctgggccaaggaggcccaatccgcgagacaatacccattcgagacgatgggccgaactgaaatttcaaattcacaatttttgtaagataacttataatccgtgataaaaggcgggtagagagaatgtgtttttttttttttttttgcgcgatgggaggattgatatcagtcgttggtatcatttgaaaccatggtgtatgtgcatgtatgtgtggccatttgagtcctctttttctccatcttgatgtagtacatattcaatgtcccatgttcagaatttctcagtcgagtcctgtgtcacaattggtggcacgggattatcagccgaccgtgcaaactagtctgcgatcgttgatccagccttgttatattagggttcgagatatagataggtacggagtacgcggagtagataggagtcgatgcaagaagaatgtgccaatgtcgatcgagatcgacttcacgtgatcgacgatcggtgacatgtgcgcatcgcattggagcagatgagatttcatcgttggatactccgtccttgacgagctggcctgacgacgttgttctttttattcaaaaggttatatgaatgtcttatgtatcttgcagatgcctaggcctaacccttttctcttcccacattccaattcatttgcctttttataaattggggttatttttagaccgcgaaaaaaaaacagcccactgtttatgtacaaagggacctcctactcgctatgtatagcaaacggtttcacattgtcctatgagatcatgacagtagccgagttttaggatcctaaataataacccacgatagtaatatagtaatctagtaatacgccataataccaacggagtcgaatgtcaataatagtcctaatacggaatcctcctcagcccatatctggacactacggataccaaagggactaggctgtcagtagcgtcttgtcttttttgcctcgctttctacgcattctctctctcttttctttcttttctttttcattctttactccctagtggtttcttagggtctctccactccccgcgtctccagatctcattggtgttttctttgagcgagctgaaacggacatttcttcgtctcacccgatacttatggtgggttcggattctttccagaaaaaaaaaagagcacatattcaaggcccgcaaggaatttgggagtaattattcaattcgttgtgagatgctatcggatcggacagacacaagacaacccactctgtggattcctgccgggcctttgatcggccgctagaacaaacccatgttgtgcttcgtctctccctgaaagcttctgactgacttcaattcttctccagcttatcccctaagctcagcttgcctttgttttccctcggtcaatcgttatacctatctatcggactgatcgcttcttcgggtatcacttggattcgacacatcaccctcaaagggcgacacacccccccaggatagtccaaagcttgatgagatagctgactcggaaaggcgcactggccggttcttcaattatcagcccgatctttcagaacagttgcttccatccctatgaaactgcccaagagctttaccaggcggaaatcgtccggcaacgttctagaggaggtggaatctcctcaccaatcctcctttcgagtctttgagcgcccggggcctcatcgatccatgacggatggagcagccctgaccaagccgctgagtgagggcaacacggtgccgatgacggaggattctgataacatctttgcggagagggagcgacccctggacaagagccggtacgatcgtccctcgaccatggattctctcaggagacggctgactgggaaccgtgatagtggtaattacgaaagctctacgtcaactaggctaagctcatcatccaccctcccatcgtccaccgaggtcccgccgcccgaggagaccttatccccgcattccagaatccatgatgttccagctcccccacccctcacgagtgcgctgcgtgccgcaggacggaccttctcgttcggtggtcgattcagcaggtcaggaccacaagtgcctcggcaacaaacaccagatgccgcgaagaatcgcccggtgacgggcagcaccgacagcacggccactccacccaagctgcccgatacagacttcgctctcggctcgcaggatgacttcaacaagatgtttgataacctgggtgctcgagagggttcggcaatacgggggtcatcccctaatccgggcaaggtaagagctgcaatcgctcgtccaggaaaggatgcagtgctgacagaatcgcagtattcctcgtctcccccgagtcatgttctgtccgggtttcaaaacagcagagctgccgcacccgctgcgattaatacagaccgatcgactactattgagtcacccccttactcctgggatcgtcgcccatccgaggagggcctgctacgtggcccgcgttctccgccgctgaatcagagccagtctaccctcgatacagttgttggtttccggaagttttcgccgtctcccaatcagtttgccgaggctactacttcacatcgttccttagagcgcccccagggatcggaaaggagaggactgcggaggagtgggatatattcggccaaggaagaatccggatctttcgacgacgaagatgccaaaatggttcgacagtctgtcttgttcagcaaagaaagcacgccaccttgggctgagggtagcccctccggtggaaccccattgatcgataagggcaaagcacctaattactctggccaagtgaacccagaacccgataatatgttccaataccgccgttcgcccgctccggccgagagattggacccctccattgcggatcatgcacggttggctgtgcagtatgcggatagtctccccaagtcatcctcgccgggtaacaaggtgatgactccatctcagttcgagcactatcgccagcaacaggaacttcgacgttctaatagcaatgcgactaagagcgatgatgagtccgaccatgacgactttgacgacgaacaagatgaggtggagaagcaacgggagacggaacgccaacgacgaaggcaggaggctcatctctctgtgtatcgtcagcagatgatgaagatcaccggccagcaagcacccgtgcaatcgctacgcccggtgatgagtggagctagcaacagcacgcccaacttgctccccagtcgcctgtctgcactaggcgagaagtccaccagtgggaagagcagcgaggaagaggatgacgatgtgccgcttggtattctggccgcacacggtttccctggtcaaaaccgcccgccaacccgcctgaacaacgtcagctccaaccccaaccttcgtgcatccatgcaaccgccatatatatcatcttccaactctgtttcaggtgccgatccgaacggcagccgaggcagtctgccaccttttgcaaggaacttgccacgagatccttacttcggtgcaggtttggttaacaacgccaaccgtgaatcgttggcgttcggaggtggttcggtatatgggggatcgtcgtcccccgcacctccccctggaggtcttgtcggtgttatagcaaatgaggagcgggcacgggccttgcgcagaggaagcccgaatacacaagcaatgcatgaaatgggaggggtgcctcggccatactcgacaatgccgccgccgcagcagcaaaacgttaccgccggggaacaagcttctatccagctgtcgcagcagatggccaacatgatgcagatgcaaatgcagtggatgcagcaagtgatgcaaatgcaaggtgggcaaggtcaacctatgatgcaaggcatgcctcctatgatgatgcctggcggagcaatgtccatgcctcccatgggccctccttctatatcgggaccccagtccatggctgacaatccgaacttccggccgatgtccatgcccgcaacatcctttctcaatatgccgccctcgcttccaccccaagtcgatcagcgcacgatgagcatgctggaccccaacgtttcagcccgtaggaccggctcgcctatgccgaatctgtccggcaattccttccggcccaacaccggatatgcggcttcaatcgctccgtcggagcgcagtaccgcgggcatggcgcctcgttaccggccagtatcagtcatgcagcccgaatctaattacgcggtggcatccccaacaaacaaacctttcggtgacgaaaaccacaacccgtccatgccgatgcctcagtctcacattccgaaatcgcatctcgcaactgtaaccgtccgccctgtttcacgggaaaatcaaaagcccggttctgaggacgaagatgacgatgacgaggcctgggctgacatggcgaagaaacgtgaaaaaaagaagagcagctggaagatgaagcgagggacatcctcgttcggggatctgctgagcgccgtgcactgagtccctgattccgtttcctctctttctttctttattcctcaactcgaccacgaaagcgtgcttgcattgcatttgaaaagaactccgtctgtgctacgctgtataaactgtccctttattctctgcatctccatgcccgcttccgtttcctaatatcctccgcttcctctacaacatgacatatgacgcacataccatcaactcagagaagggcttgccgtgccatttggatatgccggctcgataatgcatccccagccctcacctcacatcttgtttgtcactcctcgctcccgggcccgggtttccttgtatcatcttgtcatggtcattccggtctgggcagagagatttggcatttacaagtatgaatacatatgctttccttgtgcttttactctagtttcgatttttgagctcggtcttctgcgttcctttctcgctttctcatgatatcggcacgggaagagacatggcgttatttatctgataggtttctatctttgtgctttctcatcttgtattctgtctgttttgcattgtctattcgccagagcgacttccttaatatatttcaggtcttgtggccattatctcggctctttccaaggttcctttttccttctttctttcttctgtttaggttttgtgttttctacctcaatggagatgtatatctaacgatagcgtagatctgggtcgagataaggaagggatctccatacactaggtagttacggctaatatatgttatgttatctcatatcaagatgatcgattgcgtgcgtatagcttagaagttacgtcgtgtgaatggtgtccaagcatgaatttggcttggtttagtaggctacatgtctcggaatcccgaggcttattaaaattcattggaaaaatcgtggaagaacatagggtttgaaggaactaacactagtgtatcttgaagtgagatgaagataaagtcaatatgtatacagtcatgtgacatcatataagagagcggtcacatgatccatatcgatatcgatatcgaccacgatatcttcatcactcaacgtcaaaatttgagcaagcagacagcagggcctgaaaaaacggtttaaagtatagatctccattgagatcctttgtcgggattttttcgctattgataagcaccctcaatagcgtattccgaagtcacacgccattgatcgctattgtcttgtgattccctattgtcttcagaggtcaatacggaactacttctcgtctataattaagccttgaaactacacccagccttcaacctctcaccaatctctctcttctgaaactgcacaaattcttcgatacatacataaaatcatatcatccataccgatataggtatcttccaaggttgccctcaaaccctccggctttttaaaaacagctttctcgccacaatgaatgctccagatcggtgagtgcagattctcttttgcaatccccaaagtcttgttcatttccagctgctctggtgaatttggttgttggatgtcatatgtactacagagcatatttcctagattctgggttaaattgtgccttccttttttcatatcttgtcaatcagggaaggagctatggacatggatagccaggatggcactttcctcgcaccgctcttgccctggcaatcatttcatcttgcctatttataccgtctcctcggtcaacacatcttccctctttcatcctcttgtttacccgtggactgtgatcctgttttacactgtcgccctcttttttactgtgtatccctgtttcatcgttctgttttgtgcagccatgcagggccctggatttatcacggccactgcggctatcgccagagagtgtgctggtcgccgtggtcgcggtcgccactcgcgtcaccctcgccctcagaaccccagcgatgcccctgatgtgtcagtgtcattagctctcggattaaggcctttgcttcattctgattttgaccttcttctgcattctcatcttgctttttcatctgtggaccataaactgaccaagctcatgaatatagttatgaagccatcctgctcgctcctggcgaaagcaagattgatgttgaggtcgacacccgtaagtcatgctggtcagtgtacacgacacaacctcactaaccatctctctctaggcctcccttctgctgccatattcaccttccgcaaggaagaccacacccttggcaacatgctgcgtcaccgtctcctcaagactgcccatgtgatctttgctgcctaccgcgtaagcaacctgctctatgtgcatggtgtttcttcttggaagatactaacaacaatccattaggtccctcacccgctcacccccgagttccagctgcgtatccagactgatggtgaggtcactcctcgtcaggctgtcattaacgcctccgaggctctgatcaaggacctgggcatcctgtctcgagagttcaccaaggagttcgagcttcgcaaggctgccaacgccgccaatcagcaacagcagcaaagcaccgctgagtaaatggttatgagtgacacccagctatcatccatcttgttttaactggtctgaaaatctggcgcatggagcagtcatggtgttttatgccttgcgtttgctttcttttcgttttcaatctttaagggtggctcctttttgcgcgggcatgtttctttttttcaataccatcagctatttgctacccacaaatctacaaatttacaagcttgaagctctaatcatcacttgtatccatcaaccaattattccagttgtagatccaaaaatatctcgaatgactaagcaccagatgaggttagcgtaggtgcctccgcgtccagcagcggcgtcattcgcatcctcctgagactcaactcacttagaattttgcattcgtcaatttcttttggcttttctgcatctatttggctcatgcgagcgtggtgtctgtgatgttttcctcgtcgaataatttcctcgggggtggtgccagtggcggccaggcaccattcatgcaacagcaacaacaacccccctattcacaattccctcaaggccagatgtcgccatcagtccaaccccaaccgactggatttcctctgcagcctactggtctcgctccacagccgaccggattcgccggccagccctccccgttcggtaactcgcagctacagcctcaagccaccggattccccgcaggacagctccagccgcaattcactggctttcccggcgccgcgccccagcaacctcagcagcagcaagcgcaaagcttccaaacacaatacactggataccctccccagaaccaagcgcagcagccgcctccggtgccgcagataccaactcgattcaagacctccagcgatatcgcgaactccttccaagatgccgctggctctggggcgccccctcaggtgccgccaaagacaggatcaaagatcccaaacattcggctttcttttatcacggcacaggaccaggcgaggttcgagcagctctttaagtctgcggttggcgatagcaagacaatggatggtttgtccccgcgcactcaatatatgatatggcttgtatacagtactgactggtcacaataggcgacaaagcaagagatctattgttacggtccaagttgacaggcggtgatctttctaagatctgggttttgtctgatacgaccaaatctggacagttgttcttccccgaatttgcattggccatgtacctctgtaatattcgtatcaccggccgcgagctcccttcttccctacccgagacggtcaagaatgaggtttctagtatggttgacatcatctcgttcgatgtccccgacacacagccggcggtccaacagcggacaaacgtccccaactttgatgcacctctcatggagaacaagtcgacgcccccaattgttcagcaacctgtcccgcaacaacccaacaacgcccagctcctatcgcagctgacagcacagcctactggattctttccccagcagacgggtatacagcaggctaacccgactggcttccctggccagaatcagcctcaattccttcagcctcaacaaaccggtttcatgacgaatccacaggccacgggatatactggccctcggcctccgatgccgccaatgcctactggttacggctcgaacctcagccctgctcagaccggtgggatgcaaggcctgggtgtgcagcctacgggtctggtaccgcaacctacgggtataccaggtcaatggggattcatcaacacaccatcgcaaggtttgcccaatatcgaggctatgaagcagcaactcatgccgcagcctgggcgtgagggtggtttcagtgctgttggtctttcgggaaatgctacagttgcctgggcaattacgaaggaggagaagaagatttacgatgatcttttccgtgcatgggacggtttccgcaagggtttcatcagtggcgagactgccatcgagatcatgggccaaagtggtctgaatagaaaagatctggaacggatctggaccctggctgatccccacaaccgcgggcggctgaacatggatgagttcgccgtggctatgcacatgatctaccgtgctctgaacggatacccagttcctagccgtctaccacccgagcttgttcctccttctacaagacacttgaatgactctatcggtacagtcaagtatctcctatcccaggatgctgaaaaccgcaaggctacaggcgcgttcctgcagccacagaagaccggtgtcagctatcttaaagatcattccttccgtggtggtgcagcaggctcttctggggccagtcgcaaggatgcgacggttttcaagaataatgactccgctggtggataccgctctagtgcacgccgtcgcgtggctaacgaggctcgtaccccgtcaccggctgcatctggcgcatccgaggaggagtactctgtggaacagctgaaaaagaagatccacgaggccaaggtcatgattgatgctgccgacttccaggatgagaaccgagccgaggatgatgacgctctagaccgccaggatcgccgcgaggcagagagtctcatggaccgtatccgtcgtgtacaggacgatctcgatactcaccccaacgcctcattccgtcaagtggacagcggagcagatcgaagggctcttcgtcgccagctacagtcttttgaagatcaagttcctcaggttgcatctgatgtgcgtcgtctcgagcgtgaaatcgcggacgcgaggcttgagctcttccgtctcaaggacgccaaggcacaccccggtggtgcttctaatatcattggtactggccctggtggcactgtgactgaggcagatcgcatcaaggctcgcgcgcgtgcgcgtatgcaagcgcgggctgccgagctttctgggcgtcccgcacccgcaacggaagatgacgatggccaagcggctcgtcgtttagagtccgagagcaataccgtgaagatggagcgggagcgcaacgacactatgactcgtgatgtcgaagaaagtgttcgtgatttcgctcgcagtttggaggacagtcttcgggacgagggccaaaactccacacgtgagcatgagaagcgtcgttgggaagatgcattgggagttgaagacgtcatccgcgacttcatctatgacctgagccgcaatgcgcgaacagcaaatgttcgcaaagaagagtatgttattcttatcagtcaggaaaagtattcaacgctgacagattatagacgagagagaccttccccagatgcgcattctcgagcatccccagcggccgaatctgctgctgcgcgcccttcgatgcccacatccgtgcactcgtcaagctctcttcctggtaacacacatgaagatcgtgtcgcggctgctcgggagcgtgcacagaagcgcattgctgagcgcatggcagctgctggtctgaagccaaatgactccactgagactcttgcgcaacgccaggagcgtgagaagaaggagcgcgaagatcgtgtcagacgcgccgaggaagaggatgctaaacgggaagaggagagacagcgtcgcttggccgaggaacgaggtgttcctagtgatgcagccccgaaggctgcgggcaagaaacccccaccggcgccgcccacccgcagggctcggacggatagtgccggccaagccgatgctaagaaggcagaggaatccgctaaaatggagcaggctgcccgcgagcaggccattaaggaagaacaagaggtgcaggaagccgagactaagcgtctagagtgagtaatctacagccggtagagacaaaatgagcggttttggctaatacatttacaggagtgaggcaagccaaggggagttggatttccaacgcgagaaggatgctcaggctgctcgacttcgtgctctcgaggaacaagtccgccaaggcaagattaagaagcaggaagagaagcgccgccgggaagaggctagccgacaggccaaagagcaggaagccattcttgcagcccagcgcgttgaactggaggcggccaaggaacgtgagctacagctgcagcgcgaactcgagggacttgacgagtcatcgtccgatgacgaaggccctgccgatattacgcctcagtacagcaccccgacgcagagccagaccctccctaccccgcctcctgtgcccacaatagctattcctgagcctcctgcccccgcgatagctattcctgagcctcctgtccccacgatagctattcctgaaccacctgtccccgaaagcgtgcctagcgagattggctcccccgaaagcagccgtggtgttcctgggctcacgcccgacgctgagtccaaaaacccgtatttcaagaacaagagccaaccatccgaccccatccaagcgacctcgccacctgccacagctcagtctacgaatcccttccaccgcttcgtccagcaagaacctatcaagcccaccttcactggcgcagcccccctggaacgtaagactcgtgctcgcccggaggaagacgacgactggtccgctgcgggctctgacttcgattcatctgatgatgaggatgaccgcccaaccggcggcagcgccaaacaacttgctagcatcctgttcggcactatggcacccccacgtcctctgagtgccatggacgacgacaaatctgcctcgaaatctgctaccccggtacaagaaagtccaattgcacctccgcccccacccccagcaactctgcctcctcttcctgctatcccaagccctggcgatgccgtatccccatcacccgcgccatctgcaggagctccacctccacctccacctccgcctcctcccccaggagctggtgctccttctatggccccgcccccgcctcctggcggagccccctctgctcccccgccaccaccgccagctggcatcccacctccacctgctccccccccccccgccgnnnnnnnnnnnnnnnnnnnnnnnnnnnnnnnnnnnnnnnnnnnnnnnnnnnnnnnnnnnnnnnnnnnnnnnnnnnnnnnnnnnnnnnnnnnnnnnnnnnnnnnnnnnnnnnnnnnnnnnnnnnnnnnnnnnnnnnnnnnnnnnnnnnnnnnnnnnnnnnnnnnnnnntgcccccccggccgcggccggtggcgctggagctggccgaggcgccctccttgcgtctatccagcaaggcaggaccctaaagaagactcaagtgaatgatcgtagcacaagctcgtcggcaggacgcgtgctgtgaagagggaattggaaagtctttatttttattttgagagtacatactgtacagtggcgaggggaaagacatggccgtacctacatgattggggagtaaggtgacgaggtctatggataatggtagtgtagtaagcgagtagttagctgcgtttttgtactcttcttggaatactcatcgattttgtttattatcatcatttggcctaacattggaagcaatctgtctataagcgccgcaaatcgcgttcattctaggggttgttcacccgaatccttcaacatatccgactgattaagtactccaaagatagtcccggaggtactctagtctatctagccttctgttttggattttcctttcctagttgttgggatttatgtatagggaagttgttccttgtcgactgcctcaacatctctaccctctatatcactatcatattcaaatacatttcattcgcttgtattgatttagaaccccggcaccgatactctaagatagaggccgtacactctgctggttatggaaaacatcatccgggtttaccgcagccttgacttgacctatagcaccggccactaagccatgtagactcaatacatagacctcgatgaatcttacatttagaaatggcaaacacgccaagattggccaattgaagcatattataattccatattcattactttctttccacgggtcttcgaaatttgataacgacccccattgttaattaacatgtatctatcaaagtgaactaggtcactttttaatcatctcgtttcccctgctttcgtaatcgtaaatcggagtagcgaaacggaggcataggcgcatatgtagacttcattgaatctggaaattcattgggactgctgtggcttatggaagagcccccttcatgaatctccctgtttccatcgccgtagtcatgaaacacaagtatctcttgcacattttcttctccaaccggtgcatctgcttctgaattggagccaggttgtgatggcccagaaatatctgttcgtgtccttgacagaggtgacacaaaagtctttctcgattttatggaagacttcttttctgatgatggggtggatgtgcgagctgaagagtccagaatgtcttcatttatcaaactctgagcctcagaaagggggttttgcttgatctgatttatggtgacgaccatcgattttgtattcacgaccaactttggctgagtgctggtaccggagaattcactcattctctcagacaatcgtcgcagacatctctcttgacgatttatcacccgcctgagctgtttcctagagtagaattagactatatcactctgtattcgttgcgaaaacatgggtctcacatttgcatcttgagagatttcatttcgctttttgagacagatggtttcttcatttctctcaaacggaaatcgagaatgagcagacagttaagcgctgttagcgtcattttgaaactggccagcgtgataaggggaagctggacctcatccttcatccagtgccaccgaagctttgcgataagctgttcaaatcgactagcattgctttgttttcttaaaggcccaagcttcagaaaaatttcaccgatttgtccaaaagcgaaagtggcttgggaattgagagtctcttccagcttttgctggcgagcgagtttcatgaccctgttgtccagagggccactaatatggctgaatatcccaaacaggctcttgcaagcggatacctcatctgcgagaagattgacctcttgcttggcgaattggaaggtatgcttgaggcggtgcaatcgtttaccacatttctctagctggttatagatcgcgaatattgatgataccgctccaatggcttccattgcgaatattgccttccttcagtcagcacacaaagccattattatactttaaatacctaagctgaggggtaatgaggctcaacgctgatgacagaagaaccgtgagaggattcagtgagcctatcagagtaaaacacgacgttcctacatatatagtgccgtagtttgcatcacatcatgtctgtgcgcatatattggttgtgcatactacgagtagattatcactctccaatcaatcagcttattcacattgattaagagtccttagggctcgaaaccaaggtctaactgtgactctgtgttagagagaaccgctacgtaccaactcaaacccattgaatgggagcggctctccatgaacgcgaagttgaaagctgcgcattatacgctaatgtgaatatgattacagttcgtaacatgtttgtttgtttgttttcttgggagagggagggggatagtgagactcgatgctgcgttagtagaggagccaacgataagagggcccgaggagcctatcaaagtacaacacgatgttcctacatgcatagtgccgcagcttggatcacaccatgcccatgcccaacgaacggagccgctgcataacaccaaccaagcaaggtgtttacggtagctgtgccacgccaaggggtaatcgttgttcaagctgtaagttctatttgaactaatcattttcaccaaagactgcgagcagtgatcacgaaagagggcagcatgagataaaaaaaaacaatcaagtccgtatgttcagcagtgtccctggacatttgagaccctcgcagccaggatcacgggtaagccttgccctagtttgaatggcagtgggtgtggtttgatggtggagggtctttgggagttccttccaatgaccctttcaaagattttgattttgactttgacaatttcatattcgggcctgaggacttcggagaagggctggcttagtggagaagttatctggtaagactggcgggacaccctcttgccctacgtgatgtggtctgaaataaattgtgactacctgctacggcagtcttcaaccaactcattttgcccgcagtaaaatacacaatacatacaactatacacactagtatcaggtatagtcgattggcagggtctgtgcatgtagccattggccaatgaccatgcttgcgttgtttgagaagtttgcaagacgtctcgcctcgatcttcagctcccccgcaatgtccccagatccacctgggttttttgacccacgctgctgacatgcacacttgtgacgtccattacaactgcgcctaaggagctatcggtatagcttttgagaacgagattgaggagctggttggcgaaagtcaccaaccgaaagctacagggaaatgatacggacacactattgtctacaaaataggcagctacccctctctagcatcattcaccaatatgttcgccctatcgcccaatcaccacggtctagcaggcattcctaactacctactaatatctgccaaactgcattcattctgcgctttattcttggcttggacagaagctatcgtcttcgccctttttcatctgctcgaacgccggtattcttcaatatgagtatcgaaaaccaggaatactcagttgatcaagatattatttctttctttcaaaagacttccaccgaccgctcgtcctgtgatgatcgagcacggacacttgtcggaggcactgtgacccccgttgcagtgcaaggcgcttgcagttattctgtatatgcaggtctagagtatgtggttcagttccgactaaggtctcttgggctgaagacagaaattacaaatattgcccgcaatgtatatgggaccctagtgccctccgtctcttatcacggtcagattgggagagatgatgttagtgggaaggaatctctctctgtctatgtgatgagtcgggtggaaggcattagccatctcgattttatccttgcgcataacctcccagagaattcgccagagtactttacctggagagagaatctggtcttcgagattgctaggtatgtttagagtgagtgggctatattattgataatgatctaacccgaaaggttctttgctctcacatggaaaaacccgcagaatgtcgaccgatccttttgtgaaaacctcgatcaaagatatgacaaagacctacggcggctcttagctgctctacctgatcgcttccacccaatcatccaacaatcgattgacgctctacctgctatattttcgctgcctatggtccttcttcacatggattttggtaatgtgcaatatcatggttgataccgacaataaccatctggtcggaattatcgactgggccgaagcagagattggtcccttcggaacgaacctccattctctccagcagttcatgagcaaatatcgccttggtgttggctggattcgatatggtaactatgacactttgaacaacttttggaatatcctttccgcagacactcggggtctcgagaaggagacattccgaacaataaaatctgcaatgattgtgggccttttgctttcccatggatttacaagccgccttgccaacatgccgaagcctgagcccatccgcgacgacaaaagcggagcttacaaaatgcttggtttggatggtttacttatcgttcctgctacgagtattgtgaattagaggtttttagtgacaagcggccatatgttgggatttgaaatgaacgagtgaataagctatctagtagtgagccaacccgtaagtcatggagaatatctgtacatactatgtattgggttagattgagtgatacttatcagggtgttcccgtctggagccatggaagtggagatgagtaccccaactaggcacggagttggaaggagtacggagtgtaagctgtttggttggcttggcataactactggccagagcaattctcagtgggggaagttgtgactattagatggcgcttgctttaggtaaacacgcgttatgaagttattcaaccttggaagaggctggggaatatgtagtaattcagctaaaataaggcattctggcatcacaatccccctaaaggagatcttgaactctcggaattgtaagctgcaataggatacaccccaagctatgagacgccagtaaaaccaaatgtataagctgttgtatacagaatctcggagttgagtgaggatgcatttcgtatatcatagctctttcataattatttcgcatacacaaagactatactattggcatgcgataagctgtacaaactggaacgcagaaagaaaaacaccgacacaatgactgaccaataccaactccaaaccaaaccaacataaccgctagaccaataagtcgcattcttaattggtgcgtacatcttccaacactaattcacaagacaacttccgcaatcacattgcctagggtactcacacaccatacagcgacaagaccccacccaatccggcgatccattctccaattgttcaaaggaacaacaatcaagagcccaactaggatgaccagaagcgtcgcgccgctgataacaagcaccttggagatggcgatatcatagggggcctgcacaggagcgataccttgcagcccctcattgtgtctctggttcccgccattgatggtcatatacagaccaccaagaccgatacccaggaggatgttgagcattggtccaccgaagcaggcgctcaaagccatgaccggatatccgagtcgggcgactgtgatatcagcgactagatcgcctagcgagtttccgacggcgaagatggtcaatccaagtagggaatcagagatgttgaggataactccgatggttttgaggagagacacaacttctgtagcgatcgtcgcgatccaggatatggcgactaggaagccaagtagggagaggaagggccgccattgcggtgggaggctgaggatgtcggtttgggatgtacgcgggaggaaagggatggaaagatcttcactgggacgtcggtggtttcgttgacggcgagtgcttatgatcagggctgtgagacagacggaagagaataagagggagacaagggaggggaggatgaggttgcgcagccgacgatcttcgtccacggtcgtccaggtgatgagcacggcgaagaagggacctgtgaaaagctggatggaaaccagccagcgattccagtcctttgttggtacaggatgcgcagaaggtgaagctggcctcggcactgccgggagttccgagtcccatcgcgggcgaccagtgtgttcatgaaaggactttcgatggtggtgcgttggcggcgcattagaagctgacccggcgtagtcatgtgcctgggccataatcactggactatcggctggaagtctaacccttggggagggatggtctacatcgctgacgtcctgaataatcaccgagggtatgggatccagttccaccgactctggtgcctctggctcgatgacggggaccgttatggtaagaagcagcacactaggagctgcgataataccgagcagtcgttcccaaacatttttagacttccagcccgccagggtcgggaagagcgtgcaaccaatctgctggggaggggggatcgagtcaggccaccaattcctcaggtatttgggaaaagggaggcctacatgagcgaaatcgtcatacccatcgtgaacttgtagcagttctaactgactagctgaatttggaagtcgaatgctgggtggtcgtgagaattccatggagggtatatcagtatacaatgggaagggcactgaagggctttctaacccaaagcctgaatgacggcgcgtcgtattgcccctgggagatactgacattggggaccgttcatttatccccccattgttgtaattgggggaattaaaaacgtctgatggggcgagccggtcaggagtttgaggacttggcgaccgattcgcacgcgacacatccagcgccatcccagtatcaatttgagggagatggcgcgaccgcatggcttcttgtcccgaagtatcctcaaaagaaggtctgctcactgtaagcagtggaccctgtgttggtcggggctccaaaacactggagtcaattttcaatcccacggcatcgttcgccgatacagctcgaactcgagaggaacctgctgcactagacggcgacaggcggtcgttagtggcagatggtcgactggcgcgaggatgcgatgccactgagcgtgtgtcaaaatcggactcgtagtcgtctgaatagctgttcaggcttattgacgtattgcgattcgtgtttctcgatttctgcagcgagtgtagaacagactgaaattctaatgccccgacaagacttgcccgaatgggattcattgtattacgcctcgtttgcatgggccgatagacgtgcatgttatcacgaatctcggccaagtaccggtttcgtgtttcgtcatcctcctcgtcctcctcgtcatcttctttccatagaggaacagcctcagcacgctccaaaatatcaaaatcctcagttgaggctccgcggagcagacttcgtgactctgacgctacaccgggatcgtcgtcctcgatggtctcttcgatctccagctcttggttttccggtatatgaaagtgagctcgcgctgcgaggtctctctcgtgctttctgcgtcgccgtaccatataccagtgccacgttaccaccattacgacatagaaggcgtacaagcctaccatcgcagctgcctcccatacatgaagtttcccatcggccaacaaaaacatgctgaaaacgacggccactatgaagtagcccacgtctcggacgaaacttctccgcgcgaccttgaatggccgaactaatgccatggagcccgcgacaacggacgtgatgaaagtggccgcgccgattaactcaccgattgccaagctcccactattcgaccgcatggcggcgaaagtggaaaacacgtcaggacttccattgccaaatgcgaggaatgtcacgccagtgagactctcgctcaatcctagaatgctagccaatgtactcagatcgatacacaagaaatcgcttgccgcgatacctatggtactgaagagcatcgataaccacaggatcaatatcgcgaatgctaccggttttgcattggccagcccgcaatagtagaattgaaggtaggagattagaccatcctcgtgatcggggcagttggcgcggacgtatgcacactggtttttgacgttgcgaactaagcgacactatcatcgtgtgacagaacatcaattagcctttggcaccatctcacagggaaatgattcgggaaggttaagatacctctagttcgccctctcgtttgagcaggtttatatgcggccctgtatccggttgcgcaaactgcccatgttcatttgtagtaccagttaggaaccaactcgttattgcaataagtgtaaacaccaataacgtggtgtaaaatggtcggattgaatatcgtggcttccggacggcaggctgcaggaaggacagcagctggttcatcatgacgagaagtatggcggcatcgtgagccgaagactttggatgctgtagacaaacttatgccggaaatatcaacgttgaatactcaatgcatgtacaatatctacctcacgcatccaacagatgtgggtttgtatatggcacggtgagtgcggtgagtgcggtgatgtcagctgagaggagctgtggcggagctcgggagtgggccaatgcacttagtccgccgatcgttgttgcactgaggaaacaggttaggagggtcgatcgcagatagggttgtaactagtccaagataagagggtgagaaagtaggaattggccgttgaaggttcaaaaggatggaccgaagctaagcccagcttgggtacaaaagtaatacctgatattccaggcatccacggtccaggattacgtgatagatagtgcgtcaccggtacatctggaccaccgtatgtttgttgacttccccatttgttttgtctcatcgacatcaacccctctctccatagaactttccatttcaacgctgttatcgccatcccctatcgggggcaaccgcaaccatgccgcgtgtcgcaaacaaggtacatcgccgctctaacggcaactcgacgccgcacaaaaacacaccggtcaagtacggatctggatatctcctggttatcgcattgaactaattatatcaggatacccctcaacgatgatgagggcgagaaggcagcgcgtatggaggctcgtcaagcacttcatgatcgccaaatgagtcagattaaagcggcagtcaagacgcctatgccaccccgtcggtacaccctcgatcgtgaagagagcgacagtcccgtaactcctcgagcctcacatcatcgcagtcgcaccagcgatgtcaatggccgtgcagtgacaccgatgaagcgcgtgcctatcttggccaattttgaagaatggatgaagatggcgaccgataacaaaatcaatgcgaataactcctggaactttgcgctgatcgactattttcacgacatgtcattactgaaggaaggagatggtgtaaacttccaaaaggctagttgcacccttgacggttgtgttaaaatctacaccagccgagtggacagtgttgcaacagagacggggaaacttctgagtggactggctgatagtcgcgacaagagagggcgcggggaggaggatgcagaggatggcgatgaggatgaagaaggcgaggatggtcagcctcgcaggtcgcggaaaaaggtatggtctatacggtgtcagagatttgggattttgactaactagatgtgtctagacacgttcccatgaggctaccctcgcgccgtcattttcgtcattgcaactaaagaagttcgagctagagttcgccgtggaccctctattcaaaaaagcatcggcggactttgatgaaggaggcgccaaaggcttacttctgaaccaccttgctattgatagccatggaagaattgttttcgatagcagcgacgatgctgtggatgatagtgcaaaaacctccgaagatgaccgtcaagaatctacggatcctgaccagcagaccgatgaccaagcaaaaccaaaccagaaacccgcaagcgacacatttgagaataacacggagatcgaccttgctacactagcaagccgatttttcccagatctagatcgcctagatgaacaagatatttgtccatcgcttaaaaacctcgacttgggtgaccccagcgggtcgctggatctccctctcctcaaagcgccagaggaatggcggcaagacaagatggacgaagatggacgagcacatgatgacccatctggtatcatgctggacgacgacaacgctgtcgggtttgatgacgatgatgctaccctagccggatttgatctcagcggcgacactgggtttggtgacggaggagaggtatgggctcgggaagccgccttggaaccaatgttgaatgttcaccggaccacccacgatggggataatgatggtgagggtgacgatggcaatgaagacgcatatgccatctccatgtctcatcaaactaatagtcacgaccacgagaatattcttagctactttgacaacgcgctacagaagaactgggctggcccagagcactggaagattcgaagaatcaaagaacatgccacacccgctacgtcggcgcccaagcagcgcaaagaaaaagagccatttgagattgatttcgctgcccctctggatcctgctgtcgcggaattgatctacaccccggccagctccaactccgccgtttcattacccaagacgcagtggaaaacaaagggtcgcaaccttcttcccgatgacaagcatttcaactcccgtaacctactcacattgttcctcaagccgaaggcaaagatgggctcaaagaagattttgggcaaacgccgccggcaggatttgacggctggtaatggagatatggacgaggcattctgggcaaatcgcaagccggaagaaaacgccggcgaggaaggtgctgcaggtgcctatgatgccaatttctttgctgatgacgatggtcttgctttcccgaacggcatggatctcgatgacgacgacaatctaccattcgcggatgcccgggagatgctctctccgccagcagacgggactgcaggcacatcggctggagaagcaggtggagcaactggactcagcgcgcttttgaatatggttggcgccacgcctggccgaccgggagctggtggctacggatcgcaattggtgacacaaggcggtcgtcgtgcacgaccagactacgtggcgtatgcacgtgtcgcaaagaaggttgacgttcggcgtcttaaaaccgagatgtggaagggcatgggtgagcgcctggttgatgcggtagactttgcctcagcttcacagccaggagccgtgtccagtgatgctccgaccgaacccgagagtgaatcggatgcccctgtcccgcctacacccaagggtgaaagcccagagcaggtgggtggtcggctacggttcacgcaaattatgaactccctcaaggaagtctacccgactgagactctacgcgatatcagcacctcattcgggtttatttgtcttctgcatcttgccaacgaacagggcctcgtgctggagagtgatcttagcaagatgggcaatgatgcggctaccctagaggagatcttcgtaagtagggatacgcacgctatcatcgaagagggaggagggatgtgaaagctctttttttcagttgcatgtacagttgacatgggtagaagcattacgatatgcatgttggtcacgagtgatgaacaggacggtgtgacttggtagatccttgcggcgttatggttttgctttttcctgttcgcagtgaatggcgctcttgggtattttcgcctcctggaattacttcttttgttttgatgaattcaaagaagttcatatactttctggtataatgcttaaatggtctcaagtcaaagtaggattagtttgtcacctcaagtgttgtatgccggcacgaacacttgccgatgctaggatgaaaatctgaggagcacattcatatgtatcattgcaatatattcatttgttggacaaaaatcaaaaatagaaagagagtaaatacacaacagtgtaccaaagtccaaataggtatctgtatctcacaccaagactccacgcgtcctagggtgtacattaaactccataacgaggagagagcaaataaaagaatgttgaacaaatgtccgattgtgaagcagatcgatcgaagatgacgacctgaattgtagttttgggattttccatgtttttttttttttgtattttcgttgttcttgggcactttcattccccaccagggaaaatggaatcgaagcaaaacaccctaagtcaaaagatataaaagacaagcttgcagtcatccacatttatttgcgtgcaggggccgggtacaccgggacggtggaagcctgatacgcgccgggaatcggcacggaatcgtaagtgcactcactgggaggagaaccccttttcataggcggactctggcgctggctgtgaggaggtggcgacggcgaataatgagaaggaggagcaaactcctcctgggcagtctggggggttggctgctggaccttgataggaggcggctggagttggaacgacggggtaggccgggtaggtgagcgcggcgaggcatactgagtagtttggggttgagccatgcccttctcagcagccgagtaggggtccacagggccgacggcgtagattggggtctttggagggtaggaagtgaaacctgtgaagccgggggtgttcggggcagattgcaggcgcagttgtgcgagatatagatctgaacgggcgttgtcacgggtgtccatggacttcatcagcttgcgcttgctccagacgcggtagaagactaccacgtagatcaagataactaggatttcgatgacgatttcgatgatggcacagacgaggccccagtcttgtagacgacaaaggagagcatagtcgacgctgttgtggtagatctcctcgcgggtgttctgcgcgcaggaccatccccacatgtccttggtgtttcccgtggatttcgagtgctggtaaattgccgcgccgacgacccacatgatcaggttcacggcgaaaaaggcgatcgagaagctggtgtagtagacggcggccttttcggcgcgtccgtggccgccctttcggtaggcccagaacacgatgagacaggcgactaaggaaacgcaggacattcccagaaggagatactgagcccatgggttggttccctctgcccaggcaggaagactgttacgagtcggcaggtgcttggttgcgttaaaaacagtcaatgtcacggctaacagagacagcacaatcagactgcaaccgaaattgacgcaacgcaggaagatcttggcgattctgacgcggagtttgattctctggtgacgattagtaaatagtatcgattggcatcgtgggctttcttaccaggtctcgagcattctcgacttcagccttcttttcttgcttctcaagcatgtactcctcgcggaaagttggactgagcggatttaacgacttggccgtctgcggcaccttcaggtcaggtcggaaaggcgacattggcacctggtcattcgcatgctcattgttcgctgccacataaccgaatcccacatctccaacatctcccttcgcctgagacttgggagggtcggcgaaaggtgatcgtccagcttctgtgcgatcaatgggagagtgaattgatgtggcctcggcgaatcgagcagtgcgcgggctcttgagcgaagcattgctcgtatcagagtcgctgcgagtctctcgcacggtgtgttgtggtggaggacccattgcactgtggtaagaggcacgggtgagatctgtaggaacaactggctcgtaggtcagaggggagttgtctcggctatcgtctgataccgccattgaatggatgagcaatgcaggcaaataaatcaaacaattaggtcaagagaaccagctcttgacgaccactggactgattgttgggaatagaacgaccctaaagtcgatacaccaagaatcacaagtgtggtgggacaacggctgagctatatcaccgctaccgtgtgcgaagcctgcgtacacgagtattaagtagcagatgatcgaaaacaaaaaaaaaaccaagataatcagaaagtgacaggaaccagcctgggcacctagaatatcaataatgttcgagtgcaggcatggcccgagaggcgggggaccaaaatgcaggcttttgattctcatcactcgagttgggccagcgtaagcgccgaggaggaatttgcaacagcgaccagggacatgattggaagacgcaaagcctgtcaagccctcttgctgcaagtgcactgtacctcgatgcttgagaggggagtgtgactggccgacgggagtgatcagccaagcttgtcacggtggagtaaccggccagtgagattgtgtagcggccatgctcactcctcacgatgcacgtccatcacgtccatcacccccagcccggcgctaatccgccgatcgtccaaccacacagaatgtagaaccgctctactccgtaatagtgtgtgagagagatgaatgagcggtccgagggaagatgtgactggaggtcaacccaaaatagaggtccagtcacatacgtcgattaagcacctttggatgttgggatgttggagaggggaaaacaccgagggggtctgtgcacgctctgctatttttgccttgaagcagagcgtgtcacactcgtgatagtgatagtgccctagctcatgcatatgtctcaatcctgccgactagcttttctggggatctctccagtatcccgtcttatttttatagaaagtaaattgtccacttatcttgtcataccctattcccgtcttccccaagctcttcgatcttaatatagaatctaccgagttttatatgatgagcacgataattcctatgcgtgaataccaagataggtagccgcccggacgggaacgccatttagttagctgcagatgtgcatatcacgtcagcccagtcaagagccctggaggtacctcggtatcggtatccctgtactctctttcgcattctcttctcttaatacctccagttctccccctctatcaatgtctgtcagcttcatgaagaaaaagaatccagtgaatttgtcgctttcagtcaactactccgtagtcatatcacagccatatatcgaatatctgtatgatgggatgctccataaaggaacggtttaaccgccgactagaaaggcgccaagctcgcaagcaactgatgttttcttcatcatcaccgaaagagataggtgcatctatgataactggctggccaaaagaagccagagtcaatgatctcaaaatagaattgaaaagcgcctctgatatcatgactgggcaaagaaataccgccaataagatttatcatgagagtactatgaacactctgattagtattggccgttttatgttgatggctaatacatggcccctgcccaggtgcgcattccaggacatattggtacaatacgtacttccggaattcactacctacactctttgggattatacaattatattattttactacaaccatggcatcaataccaccccaacctggaatgttatttaaagactgggctctcgtgatctgaacagagagcttccagccacccaagacggattcagtgtccgagatatagctggggagtttgtagatttggggagttgaattcggccccattgggtagactatataaagccaagatacggttagagacggtatgattcgtaggcgcattaagttagccctggagttgctgtcaattacctgagagatcttatcttttgtacgatctgagccagttcagattgatctgccggattcacgccatatggtgccggtgttgccaacactgaatccagaaaaccgaaaatctgtttattcttgttagatgtatttctctatacgatacctctggaataacggagtggatttgggttacctgggatcttttccaagtataaccaactcttagatccaaaaggccaccacatgccggcaatatattctctgcgaacgtgctcggggcatgcgggcccaaaccccctggtgtaacgtgccaggtcttacaagaaagagtgcattcaattcaaaataactaagatgaggagagaaagaagaagtaagttgtgaagtgggaagcagccagttattatagctgaccactttgcaagcgttgcaaacaaccaaccttctcgcttagctactaacaaacaatctatggaatgcaaactagtaaattatgcaaacagtaagcgagcaagcaaacatgaagcataatgatagcgatccatgtggatcgtgacatacttaggcggttgctcgagcggttaacagagcagtttctcaagcagttatataagcggttgcccaagcttagtttcttaagtagttgctcaagtgattgacgatgaagcaattaataatgatatgacaaaagggacttaattttattagtggtttacatacaaattgtaggtacctactgtcttactactatcatatgacaggaaatatgctaattgtgaatgcggtactgaaattacaggcaggggggagaataagccagtcagagggtggctttgcgtagcattagaagttggaatcagtcgccttgctctgcaacgactatctagagacctatggccgtcgagatccctagtatattagagactaagaaagcgagctatgatgtagacgatgaagactgtgagattgcgccctcaaaactgttgagaacccacttcactgaacataagcacccgaagtagagtcttataatcgtttcatcactgaaattatcttccgtatgtctgatatttaaagatgacttgtctaaaaaaagactttgacgtcatcagtggcgaaaaaagccgcgcatcttttattgcacctagcgagcataagagaccgatagacctcttgctgtcaaattggatacagatgctgtatttgcagtctaatgagacttgctgagatcttcaaatgccaaggttgtaatggcaacatgtgcctcggaatacttagaaacacccttggagtgattaaaatacaacagccggcattgtgagagaggcgacttaagaggtggagtgttgcccacggaggtgatgagtaggcagcaactgtgttccataagcgggattgctttgggacactggccaatcatgtcgtacctcaagcatacactaggtaatgagacatgagtatgtactccgtacaagaagtagtattagttggggtatctgccaaattcacaagaagggtattattccagaactattttaaaatagtctatagttggtcttggcattagggtggcgagaccgatgttcagaagcactgtggtcgttcataggatcaggagatattgtccgtgccaaacctcaacagcccctggaccccgtttctacataacgtacccatggatgttctaatataattggctcgagaaacaatgataccaaagaatgacacctgctatgatggtcaggatacattgacagtcataaagttcccagcagaggggcttgagggagtggcaagagtggcaactgcgtgaacatatatcctacgaggagaagacaatgtttaggatgataatttgcataacgagaatatatgggaagtcgtatctgttataagagatgatatagttaatgcttgatctcaacgctactgtcggtagaatatcaatcctctcgaccacatggactgacagaaacgttttaacttatcggagacttggccacgaagcttcccgtttcatgcaggtatctagagtaatatatggatgacaagtaccagccacaggttatttttgggagtggagtacgcagccgtcaaggactgaacaaccttggaaggccgctagaacactccacaggggttccctggttctgaatataatgcgttgcatgatagattagatacagctgtcaatcaccgtaggttaaaagaaacggtactctctagatgctcatggacctttgtgccttggagactagctacatagtatatatgtatgtagttagcatgaccggcgtggtactgtgccatggggctctgcgaggtcgatcccccagccacctgaggcgcctaaaacgtacaacgttataagtacactgcctgaaacatggcgcagcaagtgtgttgcgccttgtgccaccagggtgatcatgggcaatgggcatggacatattaataaagtaattaaagctgttcaagaaatcagtacattacatagaacttgcgtgtattgtatgtagtacctagtgggtacatcggcactacagatctccacaagatcaggcgttctactgaattgagaattagaatgtattacatacaatatattatacgcgggtctccggggtgacatcagtccgattgcccctgtatatgcactccataccaagaccatggtagtaatagagaaataccggtttgaagtgagatgatctcataccgtttatacttaagcctcaagatgtcgatcgtactagatagatttctaaccttttctaatgaatgtaagtgaatgcaattgcattgtaaggcaacgtggacggaagagggaggtcagccgcaggaaatgccccacgagccagccacaaagtgttagcggtctacacagcctcaatcctaattaagtactgtgtacttgttcatacagagtatctgtattgtaatatcaagtcctcagtacctcattacctcagggttcatttctccagagcctcgactctccagtccccaccaaacatatccatcccctgcccagtttctgttctcacgctcactttctttgtgtcttttcttttttgccttcggatcttagacgatagatgagtgtaaatggtatgaactagttcattaccatccacttttctgttcaccactcacattcttccatctcttggtcttatttcgttcctgcgccccgactgttccaaccttcagatggccattgaatctcatccactcattccccgatcgctattttaaaggcctaagcccctgggatcattcaggtggatcttgagaagtttgaagctgaaaccactcgtcagcttgcgccacactcgtgagaaacgccccacacgccctggtcttcgctctcttcccccccaacctcgtctgcttgaccatctttgatatatcccggtggatgaaagttagtcaagttcatttcccccaccaatattccttgcattatcctaacatggcatctaaagtagctttcgcctttgctcgtccaccctttgaggctggcgcgaaacattctttctccatggcgacgttgatgtcgaacaacgagcccatcactgtctccaactcgctatccgcaaactctattaccagctctgaacccctctctttattcaagtcttccaaacccgaaagcctgagctcgattgccagcgccggcctacacgtctcgcgatcaagagatcaacttcctccgatgacaagtccaatatcactaccggcggatcggccggagcatgagaaggacgccgaacgaaacagttcacaggtggctcgggaggctctaggtgcaagtgaaaagtcgccaggtgccccgaaccatgagcattcagtccatgcatccccggagcagatgcaaatcgactcacacgcgaccgaaccatcatcggacccatacggatcaaacgatcatcaccacaactcactaatgcatacttcgactgtagctagccctggtcctattgaggaatccgcttctcaagatggagatcgccggtcgcgtgataactccgagatcgaccacgatggcaaatcattctcatatccgatgccgacgggtaacattaacgatccgcgtcgcggactgagcctaccgaccgcaggctaccatcgaggcagtcctcgctctccgtcggcgaagaaacaccgctgcccatactgcgcgacagaatttactcgtcaacataatctcaagagccatctgctcacccacagtcaggagaagccgttcgtttgtcaaacctgccagtcacgtttccgaagattacacgatttgaagcgccacgcgaagctgcacaccggcgagcgaccacacatttgtcctaaatgtggacgtcgttttgcccgaggtgatgcgcttgctcggcacaataaaggacaggggggctgcgcaggtcgacgcgcgagtatgggcagctttgcggcagatgacgactatggcgatggtacgaatgggggaaccgacgacatggatgggttgatgtacacagcagagcctgagcgcatggacgaagaggacgagcgaagaatgaccatgccgagcattcgcaagcacgaggcagatacagtcgctcgatctgattcaattcactcgcgccagtcaaacacttacccgccaattaccgccggtcgtcccagccaccttttcccaccgccagcaaatcatggtggatcaggcgtgtcaacatcggcttcacagtctacacacatgactttcccgcctgcgggactcacctcgggctcctctatcttccctaccaatagtatcagtgatagccctaagcccctgtccccgaatgcgctctcatcgcaacatgatagtgcaccgccacatcgcgcacactctcccagcatgggacagtccttgccacacccgcagtcctctttcggacgagcaaatcaatcttcaaatcacgcaccacctacactaggattgactctgccgcagccaggcgcgccgcagctgcctccgccgccgggtatgacctccccggatgctcgatttggcatgcaagctgcaaccaaacacactccttcgcatagccactccagtacccacagtatatctcatcttaagggattcgatggggcggatgccaattccagtgacgccagccaaatcgataagctttgggcgtacgtgcgaacaatgcacgacgaattgacaggcttgcgaactgaagttgcggctttgcgggcgcacgttgcgtcgtccaactcgatgcccccggctccggtagaagtaaacttgaataactccggaccgcggtgatacgtccttgggtggttcttgtacgatatggcgtggctgaccatcagccacgtgaactggttgttttgtcctcccctccttctccactttgtccatacgccttgattatcccatcctcgtttgagggtcaaacttgatgccctcatgatcaccctgccgacagttgccggcgttggtgttttctatgccccgttattctctttcttttctttctcttctttttttccccctttacccccggagttatgtcatccgggagagcctttccgttctagcctactttattcatacctggagtgcgctgcaaagtgtgtcctttttccccctcttcctttttttttttttgagcagccgaaggagtttggcgtgtcaaacaaaaaaaaatgatctgagatcgcgatggaatggagaacattacttctcattaaactgcgaccttgatcccctctgtcctgttgtcgattccataccaaagatggaatcatgtgattgtgtttggatatgtgcatggattacgctggatttggagtttttattcgtaatgctgctattaccgatttagttagtgataatatactcttcaatcagtcagatgaatgggtacggtataattgtttataggtagatgcttccccgtgggagacggatattatcttaaacatagcaattattctcaattttcttttttcctcgacctctatcatgttacaactatatgtccttgtggaagacacggattggagactgaggcatatctgctccagggatggtggaatatatactgacttgatgccaaagtcggcaggaacaagtttgaactcgtgatcaataaaccccacttgatcttctatatatttcccttattttacctgcccgggtgccatcgagacagacatcaagaaagattaacgaaaaaccaacgatacttcgtgactatgctcctagatgaccacatctccatggatagcccaagttaagagttaaccaatatgactcccttctcctacacaatccatccatctttctcaaatacacccaagagtctccttgatctctttccttgtatcataaaatgacctctccgctgctttcacaacagataagtctcatctcaccaagactagggttagcggattcacgagagatcatcttcccatttgaccttcgcgtatccccgtccgagttctcgggtcagaccttcaagctactgatagacctttttccaacaacactagcagttgaatttgatgatagggttctaatttattgtgtccaagtactgccaccaaaaccatggccaaagcgagttgcaggtgttccgtgttatttggcaaacgacgcaaatgataaggggccagtcattcccctttgctaccgcagtcgctctcggattgatatctctcaagatctcaatctcagggatagtgatgcttcactcgacgtgatatccgatttgttacgcggctttttcgcaaaagatcaaatctcaaccactaaatcacttggccgtcatagctcttgatcaacaaattgaccaggatgaggttcttaaggaccacattctgaggtctgctccccgctctgttgctcgttgcacctgcttatatctttcagagcatcacagggatagacctcgcgcgctatctgctcaacggctgctttgtccaaagcatatcagtatgctaatcgagatggctcctgggcctcgccccataccagcattagccctgaaccatcatccctggcagaaccaatccctcctacacagaatactgcccctcctcagcaagaatgccaatggacgattctcaatacactacgttgagactaggtgtaatggtcagctccaaattccgcaggcgaatcaatgcgttcgtcctcgggcgttctcgtcaaagatcgtctgggctctaaatatatgacaactgccgctcatagatttccattcgataaaaatgtctaccatccatctctcagcggcgcaataattgggaaattcaccacagggctcactcatacagacatcacattgatgaaactcggtgatggagtagactttgtgaatgaaccgtttggaaatacgtcgacactagccagtccttttcgactcggagatttcattcgaatggcagaaacaaaacgacaggatttggtattccttgatagcccctttaccggtcttgtcgagggcaagctgatgtctaaaacatcatgcgtgttccatctgacgaccaagatcaggaaatatgggtcaaaacccaacggaactaaatggggcaagactcagctcatgagctggtggacggtgcttatggctccgccatctggaataccgatcatcgagttctgggctttctcagttatgcccctggaacaggactctacaaggatcattgcttaagtattgcattgctgctgctgatcatcttcccgatagggggtatagcatggcctagagaatttatgtctctcaattcggacaaactcaggggtcagcggccttaggatagagtaaatattccgtagactagaatataaaaacagcgatctacagccgaggcacttcaaagacctcacatctcgacaaccctcggaaaattctatccggaagcacattactctatacagttttgaaatgtctatcacactcctacaggcaccggctgcatcctttgtgttgctttccgttggacatactgtatcattgctagactcagaactcccttaaagaatcgtattgattgtttcgtagatcaagggcagacaatggacagccgatccaagattcaaagctatcgcgggcacgaatttgtggacttgtgggactctagggtggtaccaggtgcgttgaactttggccttggtgtcttgttcaatatcaaccacgctttatactgactgccttgatcggtttctatcaacaggggagcgggttttttctatcaactggtaggctcataatatcatttctcttagccaagtttttaaccatagtaataggtcttcttcactggcaatggtcacaagatccaagtctcctccaagatccactgaacaaggccatggctgggatcgtgaatatcatactctgggctagctctgcctggtatgctaagcagggtatcattgatacttccattgtccttggtatatctgctgcgttgcaggctttcagcgttggcaaggcttgcctgtgaaatcatcgagaatatatgtttgaatacttataggccgatcggatgagcttgggtgtcttacaaagagatctatcgtgcttttgcactcgtctgcttttgatttttgaggtttagtatgttgatgaatcatgatcacaatccacagctgttgaaaatttccgagatgacagtaggatgaaggtcgacaaaggcacccaacagacaaacaacaagttagccctcctccatttgagaatcctgctccaacctcgtttcttctctacgctggatagtccaccgaataaacaatcccacatcagaaacaacagcccgcggaactccacccagcatccagctccgttgaacccacttgggaatactcccaccagcctcagaagtcgtcaacatagtccaccgaaggtagcgatcagtagaagtagcgggggtattcaaatttgccgtagacgacggatccgaagaggccggagtaggaagcagcagacgctcaacccgctcgagactggcatagtaagcgaagactgcccgctggggaacgatatccatgatctgggcatacagtccctcgaattgggatcccggcatcttcggcttaggcaaatagaaaggaacctgtacagtcataaacccgtggcatgggctggattgggttgctgggtatgagctggcgaaagtcgccgacatagtccaggatatgaaggcccggggccggattagtgcgcttgggtggaaggtgtggacaataagattgactgagtttgggagttagtaggctgtccttgtgcatgagttttcgggatttttatacatacgttcgacctcgaaatgcttgtagttgatgtttccaacagtaagtggttggttgagatcccagtgtctcggctcgttccacttcagcagttgctttacgctcgtcacactgggtgtgtactccatctcgtgctcagcatggttgtatcgcagcccgtcgtggaattcccatagggaaactgtgccaggcaaacgatcggagtcttggtggtcactttggcgacatacccagaattcctttttagattttgagtcctcttggggggattgcagtgctcgccatccccgtgaaagcttcacctttgcctttgagggtggagaagagcgcagcttgcagtctggtttcagcgtcgatggaaactggtttaggagaggctgagcttcaactaggatggcgtgaatgaactcccgcagatctggggtgttggcatccccttgaagatctgggtgacgagggaggctagtgaacagatgtggctctagttggattatcggcatgataggggatgaagggaagaaggcttggcgatgaagtagatgtacagatgtacagatggagaaaggtagtgaaaagaagaagtgagaaaggaaatcaaattttaatacaattaggtctttcttatttgtttgcgcagttcaagattatgtgagaatagaaggtcgcttgtttagtcgctggtttagtcgcttgtttagacgatcccaggaacacaactatattctcgtgaagacctgatcaatcatctgtcaagtgaatcttattgatcaaattaaaacttgggcaacaatttatataaatattatagagactatagacagcggatcccaggtccaacgctgccagtctcgaacatctccacaagtcccgcgcctagtgcttcctctagcgcccatcgaaagcgcatcccatatagctctttccatttcttagtcctacccggcaagacccctgcaaactcgccacgggctcgcttggccaagtgaaagctcttgtcggtttcaacagctccatcccatcgatctttcaacagacccagaggggcttcgccagaagcggaccgccggagaagagcgagcagatgtgcacgacctgaccctaacaagcggagatatgttcccgtgttaggaagagacaagaacagagttgccgcacgagcctgcgcatttgactgcacagggcgctcggagtgcgagatagactcgcttcgactggctgacgaagtcgccatttgaggtagattaggaagtgatgcaatacttaatgtgccctgtgtgtaagatgaggacgagacaataaagccggcacgtagtagcgccctgtactcatccgttgtgaagaccccctgcgatatcgccgaggatgttccaatccgtttcagtatatcaaggaatttctctgcaaacttgtcagttggcgacgtccaaagaatcccaactccaaaactcacccttcactggttgttccaatgcagggctttcctgcaccagcttgtcccaatcctctgctagcaccaaacaatcgcccagccctgccgcgtcgttgcctcgacccggtataatgagtcgccgaatccgaccagcctgaatttgttcgacgatttccctctccacctgtgtcggtgcctctagaagggtatggacatgtgccacagaggcgaggggaggcaaagatcggcgtagattgaggacttctgcgatacgcgtgctgttcattcctgcccgtgccggaagttcttcgaacatgccatcacggatatattgaatagcctgcagcacattctgaaccggtgcagtctccgctatgaaatgagacccgcctacatctggaagcgggtcatcgaaacctagatctgcagtcggttttaggctgcctccgccatatgtaggttttcggcgcgcaagggcggcaaagggcgaggcgcggggtttgggagcagaggatttgcgtttcttgacaccagataccggagcggaggtaagacgtaaggtcatggcatgggtgtgtgaacctttcactatgcataacggattcggagagaaatattgccttatgtcaggtgacagctagatattccgccaatcacagccgatctgccatagttctgtaatcaaataccaaaaataccgtacgggaacacccagaccctcaagtggggtaaaagcggtatgtcacagcaagggaatggataagttgttgtcttccctcggttccgcgatatccttttggcttcaaaggacttttaagtgatattcatcgtcatctctgattctagccctcgggcatctagatttgcctgtttcttcttatttgtcctagcaaatccacagggcaaacttgcttctccatcacttggcactttcacatgacgtagtcatgagaaacgcatcgtgtaactaacatttctttttcttcagcccccggtttttaggactctaacccctcgtttgatggccgcacctatccattgctattgtcaagaaggtctatctcatattgctttttgatattattttgcctatccgcttaggctcggctcaatcaccatgacggtcttcatagcatctctgtatgtggctattactggacctggaactatatatggctaaccggcgaatttcttatatagatttttgccctacactatcaatttccacatcaacaattcgcgcgcccgctctccccctctaagtcctccaagtcctccgtccgtgaaccccactattgaggggatcacacccatccccaattctaccgctagcctgtttgagaagaaccttccagggcaaacaccgggtcttacaccaggagctacaacggatcatgagcgcatatttgctgcccaggtaggcaagacagagcacgagacaaacgggtacccgttccctttggccgtcgagcaggataaccggctcctcacacggagtgagggtcattccccggtatggggtgccacaacctcgctcaatcaaccaaagccggcggcggtcatgtcgccgtctccatccattctcaagcaccaagatcctcgccccgccaaggaacctacgcaccggcctcctgcagttgagaccattgcttcctatgcaagactaagaaaggccagcacagcgagccgaaaattatcattttcgaaagctgaatggaccatcgagaccgcggagcagggcaatggtggcctgcgtaatgcagtgcgatccgcaacagacgccggaggcttggatagcatgatgtgggtgggcaccttgggtatgcccactgacgcgttggcaaagcacacccggcgcgacatcgcggagaaattggaagatgagtacgggtctttgacggtttttgtaaatgacagcgactttgatgggcactacacgcattactgcaagaccattctttggccggtgttccattatcagatcccagataacccgaagagcaaagcttacgaggaccattcgtggatctattatgtcaagttgaatcaggcttttgcagatcgcattgctaagcattggaagcggggtgatgcgatctgggttcaggattatcatctgttactggttccagctatgctgcgcaaattggtgccagatgcacaaatcgggtttttcctgcatattgctttcccctcgtcggaggtcttcaagtgcttggcgcaacgcaaggagctcctccagggcatgcttggtgccaaccttattggcttccagacagatgaatactgccggcacttcttgcagacatgcagtcggattttgtgtgtggaagcaacacccgaaggaatccagttagaagacggttttgtcaacgtcggcacgttccctatcggcattgacccaacttcttgggataagcgccgccgggcaacggatgtggagcgatgggtccatgcaatctcggagcgctatcaaggaaagcgtctcatcgtctcgcgcgataagattgattctgttcggggtattcgccaaaaacttcttagctatgagcttttcctcaatacctacccagaatgggctgataaagttgtgctgattcaagtcgccaccagcaccacggaacaaccagagctggaagcgactatctctgatattgccatgcggatcaactccacacactcaaccctcgctcatcaacccttggtattcctcaaacaagacttggccttcccgcagtaccttgctctcatcactgtggcagatgccctgatgatcaccagtctacgcgagggaatgaatttgactagccatgagtttgtctactgccaagatggtcgatggggcaacaaagcctacgggtcattaattcttagcgagttcactggcagcgcatctgtttttggaaatcgtgctcttttggtcaacccttgggattaccgccagtgctgcgaagcaattcacacagcactgactcgcgatgagaaggaacggaaagaggtttgggaggaaatgtaccgtgcggtcctgaagaactcgactgccaattgggtgaaatcgttcaatgaaacgctcacccgtgtatggaacgaacagtcttcgcgagaaatcatggcagtacctcgactgtccgtatccaggctgaccgagcgatatcgccagtccaagcaacggctcatgatcatcgattacgaagacacgctcgcctcttggggatcaccgcgcagcatcattctgaccacgccgcagcgcgcaatcacaactctaaatgaattgaccgaagaccccgctaacgttgtctacgtaatgagtgcgcgtatgccagaggaaatggaacggctgttccggcaagtcaacaatctgggactaattgccgaaaacgggtccttcgtgcgcgagccgaacgccgattcgtggacccagcttgcagacaagaagcatgtcaaatcatggaaggcatccgtgtctaatatcctggcatacttccacgctcgcgtcgagggtagctggatcgaggagcgccattgctctctagtcttccaccatggatccgccgaagaccgccaagctgcggctcgatctgcggctgaatgcgcaggcaacatcaacgatgcgtgcgctaacctgggtgtgcatgcgattcccgttgagggtgctttgatcgtggagaccactcacacgaacaaggcatctgcggccgcacatgcctggaagtggtatatggcaaatgccgacaaaaagaaggatttcatcaaacctgacttcttgctggttatcggcgataatcgcgaggacgagccggtcttccggtgggctaataaactgcacagcacaaaggccgtcgactatgctatgactgtcacattgggctcgcgcagcactgaggccaaggcaaccttgacacagggagttactggtaagtctggatttattctatttttatttcggttgactaattttttacaggcgttctttcctgtctgcaacaattggcagcacaacaggcccaaaccaaactgccattgcgagagtgaggaatttgattgacttcggatttccaggacatgaacatgcgaagacgaatacacgaagatagcaaaacggaccggagttctcattttctttagcaactatgatttggtgctagcatactattgcggcgcattttggatcaagttgagacagtacatacatggatatggaggctctacaggaagacatatttgcattgcatcttctaataatttcgggttaaagtttagaaaagaagaaaaaaaatatgattggaacaacagggaactttcctggtggtttcttgcgaacagttaaagctcagtcatttggttagtcctcttaagacattttataattttatatgaagcatctatggatgtcaaccaagcgaggtatgattgtttctggcccccgactgggttggataggataacaagccagaatcaatcccacctcttccctattttcagccttcactgtcatcaaacttcaagaattccgaggtggtcatgtactgctaggaccaaataggcaggtaccccccaaatacaggtaggactttcctattttagcgtttgtgagaaatacgagttcaggatatgcaacttttccagagaccaaaaaagtattatgtttactccaatcaaaagctatggtttatcgttaaccagcaccgcggcacctacacagcggccgggataccagacggcaaagagaagagccactaacgcaataggcgcgaattcaaggcatgcgaaatagacctcattggtttgcagctctcccatgagaccctgggcggtttccgcaagacggaagatagttctcaaatagatcatgagggtcgaaattgaaaaagccaagcagaagagcccaagcccattcgctctgatagcaagtcgagctcggaactggaaactcgccgccacgataacaaagatagtcatgacaaagacctggtatgcgaggccgcccaggaggatattgttcgccgttgtgggatcttcccggcgcgactctgtaacgccaatgagacacgcaccggcgatctggacgattgttgagatgacatccgaagtaatgaagaaggctaggatgacccttggaggtaagaatgagtactggctccctactcgtgggatcagtgccgagagaatcgtgtagacgccagcggcaagcaatacaggtgccacaacgataaaaaagtagttgaggatgaagtagatgaggtgatagggatccttcttagcggagagggatcgtgcaatgtaccctacaacctcgaaaaccagaccggcggaaaaggtcatccaccaccagctgcggttcttgatagattgagtcgtgtggtagacgaagtgaagaaaaaaccacgcggctgcgaaggcagctagggcaatggaaggagtgtagccatagatgatcacgggggtgtcattttcgccgcccggatttggaaagtaggggtcaacatagccatatgagcgtgctatttttccattagtgatctgaaacgatggccctggagagctgcgttcaagtgcggtgcctgtgatgtagtgaaccatcttttcagccctcggattcgccgcacaacagggtcagatcttctctatgtagtaccgatgaacacgctaagaaaggaatttgcctcattttgtagtctggttattgaagggagatttagcacaggcccctttacgcgagctgccaagcgtaatgtcgcatagcccaatccagaatatctcgattgtttcccgatcgggcctatcgcaaggtctcatctataccagaggacctgctaaatttgatcccttgttgttcgcacagccctcttacgtcggccacaaatttatgccattatatatctcttgacttcaatgtctgtgaaactttggaaaaacccacgtgtcaaggcttatgagtagctgactcagcttctcggctgtccatagtctggggaataagccgaggttcgccgatgtcgtatctgtggggaagaggttcaatatcagatcatataaatcacattccttagacctttagaccctcccatctaacccccgtacatatcaaacactactgcagttatgtccactatcaacccatcctttcaggaagccatcaaggtcaccccgcaaggccacaacaaatacagcgccttcctccggccagaatggtgcattggaaccggtatagtagaacccacgtaaacaatcctctcccattgacccaagctaacaccccgccagtcccacacggcggctacacaacggccgtaatctaccaactagcgctaacgcacttcgcgcacgcccacccaacgcaatacaaaagcgccgcgtcgccaatctcaatccaactctccttcctgcggcgcacagcctcaggctccgcaaccttcgaagttgaagacgtcaagatcggcgcgcgcaccagcacaatccacataaagctactacagccctcggagaaaaagcccggccagctggacaccatggtcgccggctatatcactgtcagtccgccggaggccgaggtcggaattagcgcgagcacagggtggaaaccgtaccctgctccggtggcaggctcgcgggcggacgggtccgttgatctagcagcgctgggccgcacaggcactgacggcgtttggacgaagctcgagacgcctttttcggatttccgtaaggctgcggcgcagatcgagctgtttgggcctggtgctggcgcgacgcaacagaagcgctcggggaatatgggtattgatcagtgggcgaggttccggcctgggggtgatgtgaatggccgctggacggaggctgcggtggcatatctgattgatatgtttcctatggtgttggatggatttgatactatgtctgctactgctgtggctgaggagagtgggacttcggttgatgaagagaaagcgaagttttggtatcccactgttacgctcaatgtggatatgaagaagcatcttcctgctgagggggtagagtggctttatagtcgggttgttactaaagttgttagggatgggcggacagatatagatgttacggttcttgatgaggacggagaggttattgcgctaagttcgcaagttgggttggttgttagtgctagtcggaaccttgggactaggaagatggagaagttgtagatagtcgttttaccgatatatatatacatgttttgagaatagattttatgtgttcaacgcaggcttagtttatgtctatctatatatgatctatctgttcacttctgtatgtgcaaatcgggttttatgtacgggatcgacatccccgcatgtacatcagggaagtcgatcccctagtctgtgcttcaagcttcgagcctggaaagaaaaggacgctcacaacttcgagtcagaggtcacaatccaaaatgccatggcatccgccttgacgacctttctcttggtccactccaaatgtcctccagtctcctcctcatcctcctgcaacgcctgcgcccggacccagaatttcttgccgagcctcccaacaactcgcgctttgataaccagcaaagcaggcgtagtcacccgcttcttatacctgacatccagttgtgcggtaaagattttcccgcgcgggttatcctcagccataccgggcgtagtgggcgcattggtatgcgccgcgacagcgagggacatggcctcgtcaatcagcgtcgcgacaatgccgccgtgcgcagtggatgggtggccagacacaccggggctgctaaggtcgaagatcataatgatgtccgcagggttcaggcccggggtgggcttcgcgacagatgccgcatcttgttttgttgcggggagccaggtgggggcttcggcgggcgcgggtgtgagattgcgccgttgcagggttagacagtgggggattgtggtaggtgtgttgagggtttgtgcgaagtagccatcttcaccagttgtaggctttgggcgtcgtgagtcagtttggattggtgtatattcggcagaggaaatgagattatttgcccatgagttggagcggaggtgcgcgatggcgggggccgggtcagccatttcttctttcttctttttttttcgctggtattttggtctcggggattatactgcaattgtcatagttgaggtgcagctaaaggacctggcatgaagtgtttcagcggtttcagcagtatgttagggcgccaacggtgtcacgacataaattgacctcggctccggctatgaccgatcgggacatgataaacagtcacgtggatatatattggatcaaatcacccagggtccaatggatttgcaaaattgatttgcggtggagcgaacatcaaaagcttcgaagtacatagatatctgtatgtattccctttccttgaattgaagaaccaatcatgccagtctcgagcacagacaatgcattgtctcacccccggcatgtaaccggtagttgaccgtaagggacccgatgggggaatctgggaatccggacaagaatgcgaggataaacatagtcccaacctaagcgacttatctcaggtcctgtatcactttagcgcctgctagtgcactcagcaatctccgaacagaccgttatgattcgtacggattctagcggcaggggcaacttagcctgactgggtttagtagcacagccaaggaccctttcatttgggtatcatttttccatagacccttttgggccagctagctatcaaaacagggaaaacgggggaaacagggcccctgtgcaaggcgaatattcctattttctccaacgaagatagaaatatgaaaacaatagcacgagttcactatccaccgtggcatgccaattataggggtcagggccgaacctgccaagggaagttctttcgaaaaaaataaaaataaacgtgaaataccttggataccttggaataccctggatacaaagcacctgcccattcttgtttttccctcctcaaaccctcctctcttctctcttctctcttctcttctccttgtacacagcatctctaatttatccatcatgcgttcctcaattatcttcctttcagctctggctactgctgtcatggctgacaattccactgacacttacaccttccccgctggcttcaatattggtctggtggatagcggcaccctgagtatgtaccccgaccaattctgacacgacgaagcgctaatgaagtaggctcctggtgctctgctcagcgcaacacctgccccgatctttgctcaagtggtaccaagctgaactcttgcgacccggtatgttgttgtgtatcgcgtccatacgaccgggagattaacgctttgaacagaccaccctgaagttcagctgtgtctgcagcgatggttcaaccccaaatgtgacctcctacattcagaccgttcctttctacgtctgccaggctacttacggccagtgcatcaactcgcaccccaacgatgctgagggccagcgcgcctgcaagcaggcatcggccgactgtggctccaagaacgcaagtgcggtgaccaccacctcttctgctgctgcgacttcggccagcgctacgagcactctggcattggccactacgaccgattcttccaccactgccacttcctccgtcgctgctgccagcactaccaccaacgctgctgtggccctcggtgatctgacccagtactccactggtctgatggctggtctcatgttcgttgctgcgcgcatgatcctgtaaagggacgatgttcttcggtctttgggcagttaattaccacttgatggttaggtcgcatagcgtcctctttgttgtattcccttaactcatcgcgttgccatttgctttttttccttcgagacattcgattcccctctgaataggcttgacacattacgatcgtccgcatgtttatgaacgcggcgcctgtcctttcttgttttgctttgggtcggagttcattttttgtctgcgccggtgccgatttcgcgcattaactattcgattcaaagtaatatcaccaattatttccaacccattgggcagcagaatgagagtagtgacgattgcagtgtaaatatttgttatttcacctacataaaatattccaaatcaagtaaaagagtcaaaaggcacacatcagtcgagatgttttgtggtgttcctctcgccaagactttttctggcacacactgaaatttctcaacttatcgatagactccaccatcaagaacttcacgttcgctcttcctctccctttcccacatcaaacatcatgcccgcccctaccaacaccctcctcattgagggttccttcaccgagctcgccgacgagtttgcccagtacatcgatgccctccgcaaagagggtagcctccagtccgagatcgccccgctcctcgaacctctccgccagcaggaacagtctgaaggcgaggccgaccttaagcagcgtgatgaagtcctgaagaagctcgtgtcgtctgcgaccgctctgaacagtgcccccgagaagggtaagtggacaaaaagtgtcaaagaatgatctgcagacagagtcgggaatttggcacttggatctttgatggacaaaaactgacatagattgacataaatgcagagatcacctccgcctacaacctcctgatccacctcgttcaccagtcttccgacaccgacgtgttccttcctcgcatctgcgcctatctcgctaagcccatcaccacctcccctcagttcggccctacgctcgccatctccattctcaccaccatcttcaacactctgtctgccaacgacgcgagccggtaccacgttctcctcgctattgtggccgtgatccgccagtctggatctggaattgccttcgaagccctcaagcctcagctcacttcccagcttcccacatggctctcagcgtgggggttggataacgatgacacccggaagttgcacatcgccattgccgaggcctctaccgctgccggcgatgaggatctggcccagacccacatcgtgcaagcgcttgagaccatcgacccttccgacgccagcaagcccgaagcccgcgaattggctgtgcgcgctctcgctaccgctctgcgtcgctctaccgtcttcgacttcactcccttgaccgcctcagacgccgtgcaggccctgcgctccagcgacagcactctcttcgagttgctcgagatcttcacctcggacaccctcgatgcctacgagaccttcatcgctgccactccgctcgcttccatctctggcggcgtgctcgccgagtccgccgatgccctgcagaccaagatgcgtctcctcactctcacctctctggcatcctccaccctttcgcgctcgcttccctacgccactatcgcctctgctctacgcgttcccgcctccgatgtcgagatgtgggtcatcgacaccattcgtgccggcctcgtcgagggcagactgtcccagctgaagtccgagttccttgtgcaccgtgccacctaccgcgtcttcggcgagaagcagtggtccgaggtccaaggccgcctgatggtctggcgccgttccctcgagagcgttctgaacgtgatccgcaccgagcgtgagcgtttcgcccgcgagggtatccaggccgcggctgaccaagaagccaacgccaatcgcaacggtaacggtgaccgccgacgcattcaactctcgcagccgacgcgtgaggttgaggctagtgccgaatagttgtgtccttttttataaatggaaaagttcacaaaacacaaaaatctttcagttaatagaggggaaatcttgctgtcttttcctcatgcatttcttttccctggccagttgtagggttgggtttttactgcccccgttggatgtttgggaccccacgagtcatgtcatgtcaatcttagtcttgttttatgttttccggagggatgactttccgtttgttcatttttttctattccggcttaaagaatattatatttctttagactggtcatggttcatatccgtagtcaactgacaacttcattggcttcaggttcaagtctaaaaatgctttctatactctatattcaagccgagcagagaaatcacacaactcttccccctaaagggacaccaacactatatacatcgatacaaacacaagaatcccgcttagcgagtgtgcaaaccacgagcctcaataccggccttgacctgctcatagacctgctcaacagagctatcagccttgaccgaaacaaccttattcttcttctcgaaatcatcaacgacaggcatagaagtctcgacgaaagtatggaagcgcttgcgaatagaagccgcgttatcatcatcacggccactagtctcaccacgcttcagcaatctagcctccatgacatcctcagggcaatcaaggaacaacacaagctcggaggggcaaacagtctcctcgaagaaaacagcctggtcaagcttgcgtgggaacccgtcgaccaagaagcgggccttggtgccagccggaggcggcgaggtcgccagcgagtcggccatggcattcgacagtaacgcaacggtgacttgcatcggcacgatcttgccttcgcggatgtactcgcgaatcaggtcgccgtactggctgccttcgcggacttgctcggcgcgcaggaggtcgccggcggacaggtgcacgaagccgtagtctttgacgaggttggcggattgtgtgcccttcccgctgcctgggccgccgaggaagaagacgactgttacgtcgtttgtggagaagcggggggtggccattgtgggtggttggtgcttgtttagttgggagggggggttgaaggagatagggatgaagttaaagggggtttaggactggggttcgagtcgaggttgcttgtggggtgattgtgtcggtgtggcttgactggaaacggacgttagttggctttttccttaaatgtacgctaggccttccggacttacttcaagctagtttggacgtgaggtgcggacgccggtgcgggacttgacgaggtagacgtaggcgccggagctgatggcggttatgatgatgatggggatgattgggaaattggagcggctggattgaggggcggagggtgcgcgtggcggcgaagatctcggaggattcgagtacaggcggtggggtacctgagtcgatcgggtgaatttctggctggtaaggacgagaggcttggagcggactccggagaattgacgggctagagagaacatagagaaagagggaggcttgtggttgttgaggaggtaaaatcaaaaaggagttgggatcgccgaaacgggattagctgatctgtatacctcgatgcggtacgcttcggcttcatggatctgggcagtgatattaggtaatacataatgatgacaactgtttatattcatacatgccaatagattactagatcagtgagctcctcctatatacaagtatatgtcgtacaatggaggaacaaggtgagttgaaattaggtctagaacagtatgaaactcggatccgatccatcaccttagtacttacatagtacggagtagttagttacatatgtgacaccaaggttcagcttttgcatagaacaataacctggtactcatagttcggggctgttcgctattgttaccctaggtagagggtatgtcttgagacaaaatgctctctgtccacgtagtcccaacttttagtaccaccctttttttagcatccggggtagtatcccttcgtttaagatatcttaaacctgtgcagtcttagcggtatactatagttatgattgggttacggacgagcggctgtgccaacccaggtctaagaaacatgccgagatatattttcaggactcaccgcgtatgtacgtctgcactttagtagttaacattgaaagggggattcaccaatgctagagataaattctgacctgtcaatctcatattatcaagtggtttctataaacttgattggtggaatttgacgtcggctagtacgtatattgtggaatcctttgaagtttcgagctacacactaagaatgccggtaatagcataattcggaaagcagccaagtccgcaggaagattttcaacagctataagcgacatatctttctcttctacctcctattattggcagtgtccattattgagcggacatcatccctaatcaatcgtggccagacggtgtttgatgaagtccacaacgtcctgattgtatttccatatgtagccgtggtgtgcggcatttccgtcttcggggtatggtgagcagcattgttcatcaccgtaatcacaatagctgtgcattgagctagtaaatggtccacataaggctgggtttagccgaggaagaagctggtacatctgctttagattataattcagcacttgaatatgagttggtactcacgcctatacccagtgtgcaattgcccacattccacggcataccaggaaagtatgtctcatcaccatacgcaatcgcagctatgactagatatctgatcagactcgtgttttctgacagcctcgacatgacgtactagtcgagttgtaggtccgcgcaagaggggcgacgaagaggactccaacctcactggttccgcacagagaatccatcatgataactgctccctatgtggtagtgagccttggcattttgcatgtttgattgccataatacgatgtcaccattgaatatccaactaccacgatcttagtttgggggcagctttcactgtactcctgcacaaactgctgcatcagaagcgtaccgtcgtgaacagtatataatttgtccaaattagttaagacgtttccatgatcgtagggtaagccgagggttgtcgagccggggatctgcttcaggatcaggtctgaaagagtgctcattacattcagatcatcgcccccgccttgccccctagcgataatagcatgaacgcccgttgcacatttatcctctgacacagactgtgcgtgagtctgtatcaacatcagggtgacagctgacagtacccaaacgatctgtaggatcatattgtacatgttggagaatttgaagccacactcgagatccgacgtcactgatgatatgttgaagaatacgccaccatttgaacttctttgcttgtttttccttccttatgacttcggtgttgaatgaggaaatgcccgaatttgttgaccgttgctttattaaccctccgagcctacgtagtaccgatacatcagagggttttctaggccgcggtctgatgtgttttttatatgtgattggtgttatgttaaattctaattgtaggtgataagatgaaaaccttttctcgtacatattcgagaatgatacggaatgtcgaagtgtctatccatatccattttgaaagtacgatctacagccttggccttccatatctcagcttaattgcagtgcaggctttgcgtctcaccttggctagatattagagctcggatttgacctggagcgcaatcagtcagagttcccggtagtacacccgacgaaccataccggtgctttgggagagtaaaattctagttggaaagtctccaattgcgacaatacatgttttggagagaatattatcgcttgggaaagctggtgggtagcacatcatcctaattaggccatactcggcttaggctctactccatcaagagggcaagaggcaacgctagataacacttgagtgaataactatataggatgcattactatatatatcaagttcaaatcaaactatcttgcagaatatggcctttcagaatctggaacgcctcgagcccgagtttgtgtattcttcaacgggtcttttgctgtcataccgcgcacagaaaggcttcgtgcttcccatgaaccacaggcctcaattatacttgatatgctctgtcgattaggtctcgcacagcatttcccaactctgtgatgatcggaccagaccgaggaatggtgtggccccgtccagtgtcaaacatcgctgcggtatcaggatcacaaatattgaacaaggccaatgcgccgtatcggtaggggtctgtgccgaagataaacagtgagtatatagtttgaaaggggcaatagacgtcaaaattaccatctgcaccaaccacgtgaagcgtcggaatgtccagagtatagtcgctttcatctgccaggaccacgtcttcctcaggggaaagaggaggccagccggtgatgaaaatcgcgcatctgatgcgacgaggacgaccagtctcctgagcctttctatcctcatccaggattagacttgcagccatcgtagcaccctcactatatccgatgatgccgtcgatatcgggattcttctccagtgtatcatagaggtattccatgacttgatggtggtttatccaacggccatcccaaccgttacccaaagctcgcatcacatcttcgggacacgaaccatgcggagattttcgaacgcgagagatcattgagttctctgctactcctccatcctccaaccaccggtaatgcggcccgataccgaaatactccgtgaaccctaggaaaatatgataatcagaactgctttatcagtgtctaagcccaggaggacagtacctgctggtggagacacaagaacaggaccgttgatatagtggaacgaagcgaaaccatccgtggccatctgcttcactaggggatctgcaatattgtcagctggcccttcgagtcctcaaatgtgaatgatattaccaagctgaatattaatattctgtgataagcaagtcagtatggatttccattatggtgtctctgatcacctacgtcgatgttaccaatggcgccatgaagacataagaacctcatcttgtatcagtctgtaatgatctatgggaacgaaaagtaaaatatgggagaggtaacgagcaattatagaaaatatagaaatcaacatatactaggaaataaattaccgctcgggctgtacaagtcgtgtaaagcaaatggaagattgggaaagcacgggatttccgccgagcatcaacttcccaactacaaacaattgggatatcgaataatgtgggacggtacaacatttcagtcaaagtcaccaattcgggaataaccaccgatcacccaatgctagcagagcatcgatcgccttcggagtagagacagctccatgaagctgtacacccccaaaatgacccgtatcagaagagctggtgggtatttgcaaggctatataacacgccataacaacctaggcagtcggtttccccgatttccccgatttccccgatgtcgatgtggctccccaaaattatatagactcgcgtcacagttgcaccttctgcacttttcaccatgacaaacatgaagggtgctgattcggaaggtgcgtcctatggcgaccagggtaccctccaacctatcgccatcatcgggtatgcctgccggctgccggggcaagttacatctcctagtgagctatgggagctatgtacccgagctcgaagtggctggtcacccatccccaaagaccgtttttctgtcgaagcattccatcatcccaattcatccaagattggttccttcaacccaaagggaggctacttccttgacgaggacattgcacagttcgatgctcctttcttcaacctcaccgtgcaggaagctacggccatggaccctcagcagcgcttgttactggagtgcgcgtatgaagctctggagagcgctggcatccccaaagagaattttgctcgccggaacgtgagcgtctttgcgggtggtaatttcgctgattatgagctcaataatgaccgtgataccgagactatccctatgcaccaagctacaggctgtgcggcctcgctgcaatccaaccgtatttcatacttcttcgatctacgaggacccagtgtcacagtggatacagcttgttcttcctcacttgttgctctccactatgcagtacagagcttgcgaagcggggaatccaaggaagcactcgttgctggttgtcaccttaacatcgtaccagatatttgggtttcgatgtccatgtcacagtatgtatttgcgtgtcctccaagccaagttggagatcatatgacctgactgtctggaatcatataggttgtttaatgatgagggtaaaaccttctccttcgacgagagagccacatccggttttgcgcgaggcgagggctctggtgtcgtgattttgaaacccctcgacgccgccttgcgtgacaaagatcccgtacgagctgtcgttgtacattcaggagtcaaccaggatggacgaacacagggaatcacattgccgaatggccaggcccaggaagagctaatccggcaggtctacaaagaggccaacatcaacccggacgaatgcggttttgtggagatgcatggaactggaacaaaggccggtgatcctatcgaagctgcagcagtccatgcagcacttggaaagaatcggactccaagaaacccactttacattggatcagtcaaatccaacattgggcatttggagggagccagtggtataattgccatcatcaaagcagccatgatgcttgatagagagctaatgcttccaaacgccgagttcaagaaagcgaatcctaatattcctatgagcgactggaatatgaaagttttaacgatgacgcggccatggcctcctcgcaagaaatatctcagcgtgtccaattacgggtttggaggaaccaatgcacatgccgtacttgaaaaagcaccactgtcatcaaaagccccagaccgagctgttgaggatgttgaagtggaccccaaacgcaagctgttcttgatctctgccaacgacaaggagtcactacgcactagaatcaaagacttcggtatctacttcgaacagcatcccgaggtttttgaaaagactctgttcggcaactttgcttataccctaggcaacaagatgtctcaactctcataccgtgttggcgtgtcagctacctcgctagatgaacttggtatccgtctcgcccaattgaagatcaacccctctagggttctgggagccccaataatttcgtttgtcttcactggtcaaggggctcaatgggcgcagatgggtgttcctcttatgcatgaatatcctgtctacgagttggccatcaaacgagcagatcaatgcctacgagatctcggcgccgagttctcccttgtcgaagagttggaaaaggacgcaaccgcttccgacattgactcccctcatctaagtcaaccagcgtgcacagcgcttcaaattgcactagtcaacctcctagaatcatggggaatccggcctggttcagtcgttggccacagttctggagaaatcagtgcagcctacgctgcggggatttatgacttagagggagctatggctctggcttactggcgtgggcaaatgacctcgttgcttaagtcctcgttcccgtcccttaaggggactatgattgctattggcacgagccgcgaaactattcagcctatactaaagaacctctctggatatgccaccgttgcttgcgtgaacagtcctaccagcgtgaccgtgtcaggagacatatccacgattagtgaactcgaaaaggttgtcgataataaacaacttttcaaccgaaaattgaagattgacgttgcctatcattccgaccacatgaagaaggtttccaaggcctacttagctgcgattgagaacattaggcacttctcgtcggcgataaccccattcttctcttctgtctttgggcgcttcgcggaaccctttgaacttggtccagaatactggattgcgaacctgacatcaccggttttattctctgatgctcttggcaagatagtggcggacgatgaaacacgacccagccttcttattgaaatcggtccacactccacaatgaaaggccccatcatggatactctaaagagcttgggtcccactgtctccaagattgcatatacaccaactattcttcgtaaagtgaatgcagctgagtccgtcttagataccgctgctgctgcctacgtgcgaggcgctacgctcaatatgacagcagtgaactttcccaagaccggagcggcaaaccggtggttcttgagtaacttgcctcgctacccttggcaacatggaactcggtactggcacgttgcccgtattccacagaagcatatggtcagagatggtgctaggaacgatgtcttgggagtattggcaaattactcaaatgatctggagccaacgtggcggaacatcatccggttagatgaggttccctacctccgggaccacaagatgcaagggatggtcgtttaccccttagcaggctatgtaggtttaatggatgatccgcatatctaaataatgctgactgactgtccaatagttggtgatggccattgaggctgctcgacgacgcgcgaagcaagctgatattcaaatctcccagtttgaactcagggaggtcattgtgggctcagcgtttgtgcttagtgatgagacagatgcagagaccaccattactcttcgcccctacgctgagggtactcgtggatcatccgatctttgggatgagttccgtgtctgctcatggacttcaaagcgaggatggacagagcactgtactggacaggtacgggttcgctccgatccgaaacagcaggcagttgtgatctcgagtccgttcgagactcaagccacttacatgaaagctcaaatttcccgaattcagaaatcggctactaattacctcgatatgtcccacatgtaccaggttcttggtgatctaggagccgggtatggtcctatcttccagaatattgataactgctactccagccctcaccactcgtttggcgatctatacgttagagatacccgcagtgtcatgccgaagggatttgagactcccttaactgtccacccgtcattcctcgatggactgctacattttgcttggccccttcttggccagggcttgggccgaatggatctggacacactttacatgcctacagtaatcaagcgtatgacagtcggtctcaatgtaccaaccaccgctggtgaatacctcaaaggttactgtagtggcagtcccagcttgccttcccctgaaccgaccaaatttgacctttttgccacccaggagggctctactgaacctattattacaatagatggcctggtaatgactcccctcagagattcagacactaaccgtgaagagactcgcaaattgtgctataagattagttggcatcctttggccgaggctgaaaacgccgttgaagaagatattcaagatcgcaacggccccgccgaatctcacggcgatacttatatccacggagacacaaatacgaatgggaatacaaagcaccaaggcaatgcgcacacaaatgagaatcccgtcaagcctaagcacgatctatgcattacgtactttggtaaatccgatggtattgctgataaattgagtattgccctgtccgacgaatccgggtggcaggtttccgtccggaactttggtgaagtgaacttctctcaaaagcaccttgttctacttcagactggagctagctctctgcgatacctcaccgaggatgtattcgaggggctcaagaaggcgctactcaatgctagaactgtgctctgggtctatcggactgattctcccgatgctcaaatgacagtcggcttgactcgtaccttgcgctccgagacctcggctagaatagccactcttgggttggttcctgacatcaaatatcccgagaagcctatccaggcagctatcagtgctctatggcccaccgatggaactcagcccacgaaagatctcgagttcaaggccaagggctcggagctatttgtccaacgcatagtggaagatgattctgccaatagtttcatccacaatgagacccacgacatgacaatctcaacccaaccgttcagtcagcctgggcgccgcttcaagatccagatcggcagtcaaggctcccttgattccctctactttgtagacgacaatcccctaccattaggcgatggccaaattgagcttcaagttaaagcaaacggtcttaacttcaaagacattgtggtctctatgggccatcttgcacagccttatattggaattgaatgcagtggtgttgtctccagtgtaggttcagatgtgaagaatttcaaggtcggtcaaagagtaatggccatgccagagggctgtttctcgacttatgcacgatgcgctgcgactagcgcgacagaaatcccagccgacatgtcattcgaggttgcagccaccgtgccagttgtattctgcactgcatactactctctgtttgacctaggtcatctccaagccggcgagcgggttttaatccacgccggtgctggaggtgtcggtcaagctgccataatgctagcacagatgatcggtgcagacatctttacaacaatcggaagcctcgacaagaaacagttcttaatggcccagtacggtattcccgaagaccgcatcttttatagtcgtgatacatctttcgctcgcagcatccgcagagccaccggcgatgttggtgtggatgtcatcgtcaactccctggcaggcgaacttttgcgcgagacttgggagtgtcttgcacctttcggaaggtttgtcgagatcggcaaggctgatatcacgaagaatactcgccttgacatgcagccctttgagcacaacgtcatattctcgtcggttgatctcaccaaggttggcaagtccaagcctcagctgatgaagcgcatcctgggtgatatatgtcggttgattggtgacgggtcggtgcatcccgtcctaccactttcgatttatcgaatttccgatatcgagaaggcattccgtactctacagatcggcaagagtatgggtaagattgtggtggctcctcatgaaggtgaccaagtcaaggtaaacaaagcacatccgcgattaaatttcagatctaatcgttcatttttcaggctgtggctcccaagaccagtgccactctcttacgacccgatgcatcctacatcttgattggtggtactggtggtctaggccgaagcatggccaagtggatgtcctcgaaaggtgcaaagaacattgttcttgtgtctcgtcaagccgcgattaatgagacggttcgaactttgatagatactttggctcctctaggagtgcgaattatcgtcaaggcttgcgatgtcagcagccgtgagtctgtcaaggctctgattaacgaagagatgaaagaccttcccccaatacgtggtgttattcacggtgcgatggtgcttcgtgtaagattttactatgatgacttatttacattatctgttttcattactgaccctacttaggatatgctcttcgaaaatatgtctcttgaagacttctctgccgtagcgtgcaacaaggtagaaggagcttggaatctgcatcacgcgctgatcaattccccactggatttcttcattgccctctcatcgatagccggcatcatcggcaatcgcggacaggcagcatattccgcagcaaatgcattcctggatggattcatagaataccgcagatcccttggtctttcaggaacatcaatcgacctcgctgcagtcagcgacgtcggctacctagccgataccgacgcccagcggcgacaggaggtaatgaagaatatcagctgtcagaccattgacgagtcggaagtcttggcgttgatagccgccgcgttaaccggtgatcttgatcgatcctgctctgggcagtgtgtcacgggactgggactggattcactcgagaacaacttctgggtccaggatgcgaggttcagcgtgctatatgaggccgccagggggacgctgggcaacagcgcacagtgcaacggcccgtctgtgccgctgcatgtcaccttgtcgactgccccatctaaaaaagaagccttgagagcgtgctacgaggcgctggctgcgaagttagcgcaggtgcttgttctctccttggaggatatggatccctcgattacagtggtttcattgggtcttgactcgctggtggctattgagattcgtaattggattgcccgtgaggctaatgccaatgtgcaggttctagagttgttgtctagtggcagtttgatggccttggccgagattatcctcaacaaatctcaggcctatactcgcactgagtaagatgatgatagcgtggagtgctgcggcggtatacgagccgttagaaatgatatatatattttacatgttgaatcctgattatttgcagattgttttcatttggaatttgaagccgcatcatttctccatatgttgtactttatataatagtaactataacgacgtacaagatacacagggcaaccgagatgagatgtctaacatcctagtagaaatttgctgctatgtatgcaataagagcccgagaagaataggaatgacaggagtataatagcgccagttcatgtggtattttaggcttgatttcacatataggtgaagtaaagaaaaatgcaccagctcggggaatagacgaaacgaatggataaatcaaacatgcctccatgagtttgagataacatgaaacccattaacaaaaaatgagaggaagaacgaagccgaactccaggaacaaagcgcaagagaaacccattgaaatacccatgtggattccaagaaccagaaacgccttggtgatgctaaacaattcgactgagaaagacaaggaagaagaacgctctctccacaactcccatccgggaatgcccatgcagatgagaaaaaaaaaaggtcacggaaacccatcgcataccatgcgccgacggaccgatggacatggataaaaagaaaatcacaacgaaagagacagctagagatctatgctccacgtaagattcatgtatcactcatatttagtgctgagtggagttcccagcaacggacacagccactgcgactgcggcgccgagaatggcactttcaggcgcagggttgaggcgaatggagcatccggcgcccgggtaggttgcctccgccagctcattcagatagttctggcaggcagcgcggaagccaggatacttgttgatgacagcgccgtcgcaagcgatggaaaggctcttgtccgagtctccgttttcgatgacggtgattgcgggtgattccttatcgagagagtcgacggtggatggggtcgcggggaattccacctcgttgcggaggcaccacatactgtggatggctgtcgccaggtagccagcagcacggcgggagactgtctgggagatgcgacgcaggaatcgcaggtcctcgacggagggttgtttgtggaaggtatgctgcttttgcaggagcgcggcggcggtggaaagggaggcagaggagtcttcctcgaggcaggcgacgatgcttgtgtcgaatgaatagggttcacacatggagtgtggtaactcgccgccgaacaggcgggcactctcggtagcctcgacgatgatcaaacgcacaatctcgcccaggtatcgacctgtaatcatgtactcgagcggctggtagtcgggacgcagatgggcgctgttcagtatgtcatcccaccgtgtcataggcagcacgcctccgccaaacatactcatctctgtattgatcagaacatgcttggcgtggtcgaaccagccctcgggacgcactccaaacttggacattccaatctcgtgcaccgggaagtgaatcgccatgttggtaccggtacccaaaatgagagacatgcgggtcttgggatcgacgtaggcacgcgagagtagagctgccgagctgtcgttcaggatagcggcaacctctacgttcagattgcgcttgcggcatgactggataaggatatcacccagttccttgcctacagtgccattggaggccttgaatcccttacccatggggagcaccaatccgctgctgtgcgaggtctgttcaatggggaaagaccaggacaaccccaccaccagcggtacgtcgccacgcccgtagtctgttccaacttcttgcaggacagtttcaatctgccctgccatccagtcgaaaaattgtgtcccttccagcatcttgagttgttcgtcgatgtataccgatgatactttcaagatgcgcagctcctcatcccggccattcaactcaatcaaagctacgcgaaacgtcgatccgcccacgtccaatgccagatatgtgcccttttccgagccagcgggaagcgcggtatcgtaggatggaagcatgcagcatgggctagtttgtaaacattctcggatctgtgcacgaatcttctcggacatgttgaccatgttgtgtgttgacagcggcgttgagcacgaggtttctacttcttcggcgaagttgtctaggctgcggcgtttccaatgggcgccgaggaaagtctttcggcggcgtcgcgaaaggccacggaagagtgaggggaataggatcatggtttcgagtgcggtgaccacgttatggaacaactcttgcaatcggtgtagcaccttgaccagtggcgccgacatagtcggggaaggaagatggaggagaggcggggtcgcgaaccgggggcgagggatggatgttcactataatgaagtatagaggatcatgaagcaaatgagatagaagaagaaagccctgaagttataacgttaagaaggttggggggggccaagccgatgtgacactcccactggagttgtgtcttgagtggatcggtgggagtgtggacgcaataatccccaccgggagaaagtggaaaggagaaggcagaagagaagagaagagggaaaagaagggtgttgacccaaagcatggatcaacattggcccattcttgagttgacagtgtcaccgcgagtgcaactgtttgggaaaaggaagcccttgcggtgtcgcaatccactgggtatggtactgtaacggtaatttatatgttgtggatagctggggttttatctaggggattgtgcttataccggagtcatattaaaaggcccattaaggaaagctatcttgtgccatttctatccagtctatatatcctaatatcatatatatcacacccgtcgcagctgtagtcggggtggtggagtgaagtggagttacattgtgactatattgtgtattttataggagaaccagaatagtgtaatagtattaatagataagttatactacttcctctacggccgaatatacgcagatagaggaagtatttccaatcattgctaatgtgccaaataatagaatagaatacgagcacaggcattcccaatgtacccatacatactcaatgacccccttgagtgcaacggtggtagtcggctcaactggggggtgggggacggttacatgtggaactaaatcttctacttaactcgcctctcttcttgcattttccccctggaaaacacatcttcagcttattctagcccttttcccccctcttagcaatctgattctgaaacatctatccgatccaataccctaatctaggtattctgctctgcattgcaagcgttgcaaccctatctctcgtcggatatatccgcctacaatcttatatctgtagaattatagtgttatctggcacctggatgtagccaactagattttacccctgtcaccctgttacggcagggggcaaggggnnnnnnnnnnnnnnnnnnnnnnnnnnnnnnnnnnnnnnnnnnnnnnnnnnnnnnnnnnnnnnnnnnnnnnnnnnnnnnnnnnnnnnnnnnnnnnnnnnnnnnnnnnnnnnnnnnnnnnnnnnnnnnnnnnnnnnnnnnnaggggggtcctccctttgagcctcatcaaccacgtagcgtcgacgatgctgtctacggcccgggcgtatcaaccactattgatcacgatgataccttccagagtccaaaataataaaatctccgactttgctggcgacgtttcagtatgctgccatgacatcaccgatggtgcaagtatcacatcatacccatcagtaaagcaagggtaaaaggcaacctggtgatggacaatctctgtggctcctcgtgccatctttaggtctcaacaagattgtgattatgtcagttgaggagatacaggacaagaacggcaaggatatcactgaaggtgactttgtctacaccaagtacagaggcgggtcacatgagggcaaggtaggattcccataacaaatctttcgtttgtgctcaagtcctacggcacaaatgacccgtaagtaggtcgaaatgatcatcagagatcaagctagtgcccaacaagaaggtgtggccagctaccctaaggcaagtcctcagcgagaccagttccccacgtcgtggctaatccgtgcacgttataggtcatctacaccgatcaacatggtcatcgagtcgctcataatccgatcactctaacaaagcaaaacagaagtgcagctgaatgactaagaatgtgtggttggcataaaaggaatacccatggcatagttgacgttgtggggtttcgtagttagggctcctagaacaacaatgagcacaatctcttactatccatgtctataatgttcaaaggctagtatatagattccattcattctagtccttatcaacaatctctttattatatctttgaatctgcagattatcgcagtgtcggatggctccgcgataccctttatgttccaagataatcttgtctacattatctcttcattctttatgtgcctttcagtttccattggtgacatctgattctcattgttctattcatttttctcttgtagtaagatgccggagttggcatatgttttccctggtcatagactaaaaaaaaggtatatcaacgacgtgacagtccatattctttcccgccccacattcagcagcaaattgcaagcccaaaattcaaaagtgcagtactcaatcaagcattttgataaaatatccactcattagtcatgcccgacactattactacccaaccaccaggggaacagcctccaccattgaagtatgacaggcttcaaacgacaggggccctaagggcttcgtggataagagaccccaaccaaatctgtccaattgccccctcgcagctcacaatgcaaaacatggaagaagcaggatggggaatccggcaccaaaaacgacacttcccacccgaccaaatctacgaagaaaccgtcgaactaggtctttccggcgagaagctctaccgcaagatcgtactatggaagtccggagtatcgcctggacagtactgggtgaatgactatatgttacaaacagggccaggcgtaattttcgccatggatagcttccggcctgactccgcatattgggcgcaaattgcgcaggccgtttatcaggatgagcacttcttggaggacctgaagtatgtcttccagtgcaatattattaatcctgagactatgctgtttgtgcagaagagtctctatgtcgcagcgaacggtcttggttggccagatgatagactctatgtctgggaggagaacaccgctgagtatcaggctctactgggtacaaggctcgccaagggtgtcgcgtatttggttctagcggctttcccgcgaggaacgagacgtattgcgaggatcgtgacttggggaggtcgttatataccctacgtacagatgcggtttgatattgagaaggtttgatttgggagatgtgtttgagggttggtagaatttttggcacgaacaatatcatagtaatggaatatagtatttgcccaggtcatcatacaaaggctaaaagttcgtcgattgtaccggggaagacggccattacagatgtccggacttactgtagagctttattctgtggtcccacatctctacttgtgacgcagtgtatccgtgtatggctcactttgaaagatctgcgggcccccggtcccatcatgcatgattatgtcaagagccagcgcccatgcaaggggtttgtacaaagttcaaaacgatcttgtgggtataccccgccagtggacgtagcacacattaaccggaggttgacattaattgagcatgaacgccgcgcacatcgcccaatatatccgagccgttgggccagcgatgcgcggaaggaacttgttcaagttcgaataaattgttgtcgtgactcgtgagcacgtaggcggaatcgcctccgtttgcacgcagtatgcgaataacatactttcccatctctgctagattagagccggtatgcaagtcacccaccccggcgccggacgaaacgaagcttctcccgtgccgtgagagtacggactgatggcgacatactcggcgttcatctgtgcgtcaaagagcaatggcgagattgaagaattaagaaagtcaatatatcatggtactacctagacatcttgaaggtttttatgtaaggagaagaaagcatgtgattttcaacatatcgcgccttccctcttctcgtcctttccttggcacaccgccgtgcaatccgacagccttagagttctccgtctcttttctttctctttgctctctttatactaaccggataccaaaagagagctggaagagaagcaaaagacatcctaaggagaagggatccatacgcgaatgagcacaactggtcatgtcgaggtggtgacccaacctttaccaccagtggatataagtcacctcacaaactttcaatcgacgtatttgaattggtggtaaattcgtttattcagatgaaacatccaccgaggaagcgaaaggaatccatcgacacaacaactcgtcctattgtccatgtgacggactccgggcgagcgaaacagaaaatataacaccgcttcttaaccagtaagactgccaccgtcacactagcatctaggtagggatcaagtactcctatctcacgagtcacgactggaatcgttcgtgttcttctgcgttccacgccaagaccgaacataccatgcggggcatctatgccggctggatctttagcatgtgtgtcagcaggcctgccgccagccctacagccgaaggaactgcttggacctgagggttcgttgcttatgtcgggcgctagttgactagcatgccatggccgaaccacccatgggtacgcgtcgcggagcgctaagataggacgcagagaacagatcgtagtattttcgtgggttgaggtacattttatattccgtagtagactgtaattacttggatagaatctctggtcggagtagcggaattaggagaaacccctgaccagtccatccttatcggcttcggatagaatgccaagacatcccctgaatgatcttctgtcaatcaaatcggtgataatgggcggattcagttgcatggtacttaaggcaaagtagaccgactccgagatgcaggccacgccatcataccagtcttctagcgaccgcagactgaatacatatccacgatgtcggaaataaaatatacgagaggagaagaactccgctgtgggaacgacaaccgacggcgttggcgatgtgataggacaacggcacttgtcagctccactcgacggaaatgccaagacatttcattacgttgctcggcgcggccctctgtctcctctctttggcttctctttggcttctctcggcgggttgttttgatcttaaatttaattaaatggcttttctattctcttgatcctcttatttgcctagcgctgtcgtttgccccccgctctttactcatgccactgacgacgactgtctatatgttgtggtgtctagcggctcttatgtagctttgtcgcgccccatttattctctttttactttcttttattatattcaggaatctacgcttcctagccattctttaacatctaatcatgctttgggcagctgcattactcctgttctcaggtaatgccgttgcagagcgtcatgactcggatttgttgtcgtttgtgacggtgggttgaactttgacattgttggaatcgtgtggttctaatagccaaaatccagcttcctgaggtccgagccttaaaatgggaggttgaataccacgaccgcgagcggttggcccccggttactggttcgttgcgccatatgggaaaatctccccagatcaacccaccctgaaatatcagcaataccaagtcggaccctacatttacgacgacagtggcgtatgtcttgttcccgaaacaaatcaaaaagcaccagctgactcccttctggtaacaggtccttatctgggccggagcacccttgtacgacaatcataatgtcttcgatttcaagccggtgtataacattgacaacgacccttatctgtcgttcatcgtgggctgggaattcgatgattccaagaagggccacggcgcgattgtaaaccaccattacgaggtggaaaaagaggtccaggctctgagtgatgtccacgacttcaacatgcacgaattcaacattatggacggtgggaagactgccctggcttgcacatatcgtgtccagctcatcaatttggctgatttcggacgcccaacggaagagagttatgtcacggttggtgggttcgttgaggtggatatcgaaaccagcaaggttctgttccagtgggattcattcgacaaggttgctctgcacgaatccaacatgttccatgcctcggatcacccagctggatcgcccggttgggattacgtacatatcaatgcggtcgacaagaacaaggccggtgactacctaatctcattgcgcttcacagataccatttacttgatttctggccaggatggaaacatcgtgtggcgcttaggtggacacgaaagcgacttcgagcaggacttcaccttctccaagcagcacgatgtcaagtttgtctcatcgaacggcactcaccacgttatctcattcctaaacaatgcctccgacgaacgtggctctgacgagagggtctcctccgttttgttcattgagctagacacaagtgttgtccctatgacggccaaggtgattaagcgaatcaatcgccccgatagtggcctcacccgactccgtggtagcgctcgcccccttcctaacggcaacgtctttatcgggtggagcgagcgcggttactcgagcgagcacacatcaaacggcgaacttctaatgaccgccaggtttgcatcagaccgatactcaacttaccgctcttacaagggcgagttcactggtcgacccaccgctcctcccgatctagtcgcatccgtctacggtacccacgatgaggatatgacgaccatcattcacgtcagctggaacggcgcgacggacgtcgtccagtggaagttctacgcgcaggcctacgaccgcggccagcccgtgctcatcggcactatcaacaaaaccgacttcgagaccatgttcatcgccgatggctatatggattttgtttccgcggaggccatcgatgccgagggcaatgtcatgcacacttctgagatcatgcgcactcaatctccatccgactggaaagcggctggctgggtcggttctgactctggtcctacttatgatgacccgtcaatcattgtcgctgccaacgctcacacggattcgacggctgagagtaccagcgacgaagcggccgaattgatcaacgacagtacctccaccgtctccggcgatcattcaagcgcccaatacgccgatgcgaaggaggtcgccaaggccgtctacaaggcctacgaggtcatccgcggagtcggcgctctccttatcttcatccttttagctggcactttaggtggaactggattcgccctctggcgacatgtccgcgccggccatttcggccgctaccagcacgtcccctctgaggagggtctccccgtggaagaaatccgtctcacttccaacccgcagtcttgaatgtttgacattttttcgctttcaatcttcattgttagcgctacatcttgccccgtttcgcaattgcaatgtttcgaatcaccaaaccgagcttacaaatttgcaaccacgaggaagcgaaaggaacagaaaaagaaaaaaaaaaaaagagaggttagctgcggccatttggtatacaccattctggtcacgatcgtttcatgcatatcatacccccatctggcgttattttgattgcgttctttctatatatctaccatcaggctgcgcttgagtgacgtttctgcatgcatatctttgattgtttagatcctgttttccttggggacccaagctgacctctgtacattcttcttctcattctatgtaatatcacaacccgagattcatttcgcttgacgaaatccatgtctctgtatataatgtgaacctcgaatttagaacatatcatcccgatgcccccttctttgtccaatttatacgccacagttacataatcgtccacatttgcgacttttctccctcggggcgaacgggaaatgtggcggtggagcagacgatggaaataacattggatcggttcgcccggagttatacaattcaatcagggagaagagtcgataaatgaaacaattagcgcggcatgaggctgacgctgacgacgaaatgttcctaaatcgggaggccgcgtcaccgtttgcactggcgcggatataacggatctatgtggcgttgcgtttaatgcgtagatatttatgccggaatagatagattagattaggtttacagagtggattaaatactttttctctacgaagtagaagaggggatgagacttgctctggtacggagcatgcgaactatatatctcgggcggtcactcactccgaactaccaatccttcaagttgaatgattattctctagtaaatgattttctttgttctcttctgggatttatgagtgattttcttccatatgctagctgtcaagcgcaaagcatgaaaccctaggccctctatatgaagtattatacattgaatatatggaacacagatcaatgaactaaaacctaacaatctgaccctttgcaaacccaagcctagccaaaatacccatttggcatctcgatccaaccaacgaatcctccatagcaggaggcccacaaacaaagaccttcgcatcgccatcggccttcacaacctcccgcaacagcccctcggtaatataccccgtcctgaacccatcactccgtccctccgggtgactgactgcatagacatagtcaaagcgacctgggaagcgcgtcttgaagctctccagctcttctcgcagaagcaggtcctgctcggtattgacgccaaagacaaggttgattttagttttgtcggctggattattgagaataccctgcgctagctggtagattggtgtaatacctgctccgcctgctatgaggtagacctgcggggattggttcggtgtccaggcgtggcctttgagtgccgttgcgaatgtgagggtgtctcctggtgaaagggagtggatgtggctgctcgctttgccgtttgggtatttcttgaccatgagctcgatctggccttcttggtctattgttctcttttgttagtctatcgttatgtcgggcttgggtttattactcgtacttagatcgctgatgggtgtatatgggcgtagtacggggaaccagcgtccttcgggacgggatatggtgaggagtgccgctgcagtatgttagtatataagctgttatagaacgttgatcgtaagtcgggtccatacaagttaatgccaatccgcttgtggccttctgatctggaaactcgaagacgagccgttttgtgttgtgatttacatctttcgtgctttgcaggcgtaaggtagtaaatccgaatcctgaaaagactttgggaggttcatttgactctgcattggcagttgatataagacgcgattggacacagtaagctccgatgcctagtaaagtggcagccgaggctgattttgctgttatggactgggggaaacgagttttgaacatggtgaaaattaaatcttggaattattcattgcattacggctatatcaactgggttaatatagtactctcaaattgaggtggtttacttctaacccgcgcctaaaacccgaggcccgtccaaaacccgcagaacccgtaatgagtcccgaccaccgacatgacaatctatgattctatacccagcagactgggagccccatatgatctacaactgattactccatactcttatatagttcggccttttccggaacccaatgggaagttggggttatatctttagtccaggataaaacgacgccattgaaatcaactcgcagtaattttgccacgtattagaaatttgatcaatttgtttggggcatatttaaatgacttcataatcttgagtagatcaacgaaatagcttcggcgccagcgtcgagcaaaatggatatctgagaggctaacggcgcatgcaaaaaaaagagagaaaagagaaagacaacaaataaaaccaggcaacgatcttatctcgtctccgatgtcctcattctttctgaggaacagcttgagcctgttgtataaagctcgccttgcctgtcacttcgttgtaaatattgtacccatagtcggcagcattaggaggggtatacactaggaagctcgtcaacatttgcttcccatttcgatctcatattcagcacttacagtgaagagagacggcaacttggtcagcactcgggttatgaacacggtgcagcccgatatcatccgagatataagcgacgtcattcatggtatgtctcgtatcagacttgatctccaacggaccacgaagattagagtcctgatctgggacggtgtagatagtctcttgaagcgtcccagctaagatcttcatgatgcagtgtgcattggcgtggtcgtggacgggagagcctttcccggggttccatacaaggaggagctggaaggggttagtctctaattctttctcgttgacagtatctctataggattagaatagaactcacaatatttgctttctggtttatgttctcaatggcattgcgggtataattcttgctggtatcgttgtagaaaaagcgggcccagtcgttcggatcagaggtatatttctgcgccagcgagatcaggtattcattgtccacgtctgccgatgaaataccgccactctcgcctaggtagatcttgatgtcttgtatgagatcatcgaggctgtattgaggtttgtagtgcttgttgcctagtgatgagctggtgccaagcgggagtaagggaatgacagcggacatggtggatgttttgacgttggaaggggatagatattcttggaaggtaatgagaagttatgaagaggattcatggatgagttatatgaattcatatctgtttcccctgtcccccgtgcgatcggatctcaatcggcgattgatccgatgtctcgcattccagcgtcctagaccgattacaatctcgcctgatagtcccaaaggtctgaacatgtgcttctagattagtaggctatgttgaaaaaaaggaggtgctgaaaaaggaggtgctaagaatgatagaatctgtaaaatccgctctattcacaataccctacaagacttgaatagaacttcaaacaatctagatattttttagaccaactctcaatattttgattaaatatctctaatctctctcaaggttccaagttctaatccaaaagaccattgatgggagagaaaactaaacacataacgccataacgagaacatccaacgcaatagctgcagttcaaccacccagtactctcgtgtgatttatgatgtaagagtcgtagcctagcatgcacaccaacgtatcggcgaacaagttaaacatgaagtagatccctatgtcattaactgcgtgaatgtgaatacacagatggttatcacggttatcgccggactctatcacgagagacccaacagaggaatagtcggtgagtattctggccttatctcccgacgtatcattgtgtgagtgaaaagcgcatgagattatacaccgtacaatcggaccttggtttgtagaacgaacacgaactagtcgtcgcacatgatggggtgctatgcgtggctcccgactggaacaccgggtggagttcaacgggccaatcagatatctgagatcggcagcacagtcggcgactcaacgaaaaagcccaatcggcgtttgacatgtctacgacattatcgaaggattcatgtttgaaccccctatcatagctattacgtgtccttggcatttacttaatcaaggccgagatctaatgcgcaaccttctacatgacgaggccagctgacgtttaccccagaaaccgttaggtaaaatgacatcggccgtaataagttctttataactggctcccgggtataaccgatctaattaatatcaaagtcagggatagcgctgaaaaacgaagtgttgtaacaagttggatcgatgaatgcgagggaaaactccggcggcatgaaatcatgtccgtctggcatagctggaggaggattgccactagagctgggtctttcttggtcattaggcgttgtggctgccggggtgggtcgatgtagtggttctgaattccattttcccatcgaatccgataagacttccgctgcagaagatcgaagagcatggtataaggactcggccaatttccatgtccgctgggtgctcttgagacagcctagaatgagtgtgacacggttgcagtgatgatcaaaacactcctcggaatgactggtggacgtggcgagctggataagtccacagagggtcaaggcggggatgctgaagggggtgtgcttcgagacgtttggacaaacagatatggaatcggagatccgcctcgaggcctctgttgctttgatactatggactagacgagtgaatgttgatgagagctggccagtcaggccaggccaaaagcgatcatctggttgggagtgggacaatacagatggaaggtcacttcggggtaagtgtaggagcatggcggcgtaggctattgtcaaatgcgcttgaaacatcatttcgtcaacgttgccgtatgaatcaacaatgtcgagcttcttgggcggcaggtggttgatccagctcactagtgcattttcgacagcctggagatgatcgcggtgacagtcgcgtaatcggttcaggacaagaacccggcatagtattgtcgtggcctcgatacggtagctgaatgatgaaaagacggtatcctctgctgcgaggatcctccgtttgaactcaatcatcatacgtggttttgggatatcacccgcacaattatatgctgactcttcgcagggcaaggccacctccggtgacacagtgctacatcgaaatgtcgtggttttgagtgggaccgccatgaagatatcggtgacgtatagttcccaccatgttcgtctcatgctttcggcctcaagagatctttcgggatttgtggatgaagcgaatgaccaacggttcatgccaagctccaacgcaatatcaatactatgggagagagcatcttgcgcctcgtcccattcatcacgggcatacagagcaatggagtatagtagccaagcctggaccatggaagctgaccgatcagggtttgtctttaactcagcaacgacttgttctttgtatggctgactcggaatagacgtaatatagtgagagcccacaaaatgcacagttagctgtaagaagtgagggtaattgtggtcgtgatacaaggagctgggcaccaagattggatgggcgacatgaaaattttcataatacaaccgaggcaggcgatcgtcatggagcgacaattttcttgttgaccccacagtttgctgagtaggagcattgtctgaaagcatcactggccaagagaccggctcagtggtaatatcgagccctgcctgcctgcctgcttgcgccgagggattctctggtgtctgtgcaggtgctattggcagaacaggaaccgtagattgatatcgagtctatgattaatttagtaaaaaaaaaaccatcaagtagaatcgtcaggactgacattgacatgggtttgcgggtggcgttggtatggactctcaagtcgtgatttcctgcgtccgccccgtcgggagggtagatattgacagagcaatccattttgaacacaccgcgaacatgatggtttactggcgtcacatttgagatgctgctttctgcattcagtacaggccagtgaggctagaccacttgttttcgttgatctcgttggagtcatgcttagaaatggtagaatgaagggttgacgtttcaatccccggggctatcggcgtttggcgggcggtcggccggggcattccctgtgtacttcgcatgagaattggttaaaatccctaaaatgctatagatatttgatcatttcatatcagaaattatctttccacaagatcaaagggatatttgcgaacagattttttgcgtgtcatttggggactattggaaggaccatcacgtgtcaatagcacttgcctcttccgagacgtgctactgcttcctgcaactactaccggcattgatcaagatatataccagacatcaaggacatcgcattcatataaaggccgttacctacaattcaaatagcccaatcttcataacccttgggaactctccgatttgctcttgatcaagccaatcaaaagttcgttccggctttcttcaacctctttcaagtcgacgtgcgatacccactcattcactctctctttaagaacgtcgacatcttgagaatcgatgtcaaatttatgctggtgcatgtcaaccaaccatgttttgaacgccggccccaggtgatcgatgaaatgattgaagtctccaccacccccaagagtgttggtcatgataggtccattcaaagcccaacgaaggccaaggccagatgtcacggttttgtctaatgatcaagtcagaacacgtcaaaaacattctatcaaacgggtaatactaaccaaggtcttcagctgagacgattcctctcgcgatgaggctataggcttcagcacaaatagcggcttgaagccggttcgcgataaacccgggggtctctttattgacgagcactggatctttgcctaggcttccgtagaactgaagcgcagccgtcacgtacacatgacccgttcctgggtggggaactacctctactaggggcactaggtgtggagggttgaagggatggccgatcagaatacgggctgcgtttctcttgcattcagtgacaaactccgacgaagggatgccggaggacgacgatgcgataatcacgttctccggggtgtttgcgtccaaatgagccaaaagacggcgtttaaagtccagcctctccggtccattcttatgttgaaaggtcgatcagcaccaaccatgaagagacctctttttgcaatggctaactcacttcttgtattagatctaattcaccaagatgaggatcgattttctcgacaaatttgaaattgttcaagtaatcgctttgtgtcaccttgacatcgggtatgcttgaccaatgctttatcaaataatcacggagtttgccctcagctcctggcgccgggtccgtcacaatgaccttcagacccttagccaggaacagtgccgtccaactagagccgatcacaccggttccgatcacaccgacagttttaatggaaggacgagccatgattttagacttgcgaagcgtttatttcgatctcttcgtttgaattgagattctatagaaattggctatgcgtacagtgaggctaataaatagtatatgaacccctcgaggagacagagacggagcaagttactcaagaggaaccggagtcggcatgccgaatcgggaagaaacgcttcccggaaatgcttccgagatttcgaagagtcagccaatattctgcacagtgccgggttccgggacgtccggggtggttctactctgaatgacgaaccttctttaacgaactcccatctatcctcagggaaaacttcgatatttgtctctcgccatttttatcttttcgatctagctgtcactttgggctgctcatgtccaatattagtaatcctacaaagataggtatggattaaaaagttcaaaggttctatctcatctattataaggccgacgaagctcaatgatctgctggggcgaacgacgccccactgttatggagtatggagtacatacagtatgtatgtaccggataatgcctggaacttgaaacctttcccttttcgtttgagggctcacctcttactgctttttgatcaccgagtaaaactgagcacgttcctgggtaccctgacttgatcacgggctattattgcgaagcgaagcaaatataaatcaaaaggtctcacgtacgtgtcacgtggccaagttttctcctaggggggctgaaacaatagcgtttgggaatatagaaccatctttgcactcctagcttttctctttggctctctcccggtgtgtggtcattggaacgctgaggaggtttgctctctgagatttagctatctggcaatttttattgcggtgggactattgggcttgaagggctatgccatttacctggggcgaaagctcgaaaaaggacggatagtcgcgaaaggctcaacttaggtagttctgatctttgcttgtacgctggaatcaatttgacaatgtctaaacttaccactgttttagccctcacagctcaaataggaaagaccggtaacgtaattcacaagcgagccggccaccccaaaacatatagtaaatgcgattaattacaactcgatatatcaacaacagtagtttatatggagatttccttatggattattgctttttaagtcatatctagtatatttagggagttgaggaaaagttgataccttgatggttgcgttgtatatacttctagcttttggcaacgtaattttcggtattttttgaaatcattacagaatagccttctgcttgctttaatattgatatatagtgttagcaaaccttatcgattactatcgagaaataaggagataaaataaaaatatagttgttgagatataaatgtagaatatatcgcatttactatggtgtttgggggtggctggctggcttgtgtggccggctggcttgtgaattacgttaacgtaattcccggccgagctgcgcacccgggcgagctgcgcagcccagaacacatagtaaaagcgataaattacaacatgataattcaacaacggtactttatatgagcttttccttctagtctaatgctttttatctgatatctagccacttattggagtttaaagggatttaataaattgatgactgagatatatatatttccagggttcagcgacgtatttttcgataccgtaataatggaagaactcgatttatccaaaactgatatataatactgtaaatacttatcaattgctatcggtgagtaatgaaattaaataagagcgttagttgttgaaatatcatattgtaatttgtcgcttttactatgtgttttgggctgcgcagctcgcccgggaattacgttagttacgtatagccgttaactttcagcataaggggtttgcacaacttagggcgatcacgtgttttggcacttccggtgccatttctggccttccggccttgggagcttccgagcctcggagatcatatctctcactaattgttgtctgtgacgtacaaggggatataaatacttcgcgactttagagatgtgatgtgaagctgcacgtccagattactttgtccttctctattctaaatcttcaacatcctactgaattcacaatgcctcatccacacaaaaccaccccgagcaccgatatctacggtcctgggagtttcatggatacggagttcactccagttccccaggatactgctcgaatttttgagtatcttgcaaagaacactcctgggttcactcaagacaaagagctttggaatacagtcaagtttaatggtagcgaactaccgatcattcctggtccaatcaaggcccctctcattgcagctgccctacatgccatgtgtggagttgtagcccacgaaattgtcgaaggtcgtgatggcacatcggcacgtacccagcaggtcaccgtcaacaccgatcatgctgctatctggttgggaaatatttttgcggcttccgtcgaagggaaagacgtgcctgaactgttaaggtcgcgtcaactgtcagctcttttcccgcaggatttcgagcacggctgtatgtccacaccgataaaacaacgaactactgctatctacaagacaaagacgccgggggtttcgtatcaacttcacggttctcttgatcccatgccagtcctgcaatccatgggaatggatcctaattaccctgccaagacgttcgatgaagcttatgactacatcagccggcatgtcgagcaatggaccgcagacgagttggaaatgcataacgtcaagaacgggttttgcggcagcatctgctttacaccccaagggtggttagacacgctgatgggaaagacccttgcgagtcacccactagtcggctactctcgacagtcgcatgcaattccgactcctccaattcccttgcctaatatctcggacgataagcggcccctagcaggtatcaaagtgattgagctggttcgcatcattgccggtcctgtcattggctccaccctcgctgctttcggtgccgatgtcattcgcgtgaactgcagccgcttggtagaccttaatgtatgtcgtgaattctggccttcaaacttctttatactgactgataatgtgtataggctttacaacttaccctaaacatagggaaacgcactatcgatattgatctgaccaaggacgaagataaggcacgactgcgggaactcattgagggtgccgatgttttcgttcaaggcttccgccccaatgcaatcgcaagaaagggcttcggcgtcaacgatctcctcgagatggccggaaaccgtggtaaggggatagtgtacgtcgaggagaactgttacggctccgacgggccttaccatgaacgacctggctggcagcagattggggatgcagcctcaggatcgtcctacgtgatgggccggtctttaggccatacggatggtttgggcattcttccaccgcttccaatctctgatatgaccactggtcttgtgggtgctgtgggggctcttatggctctccgggatcgggctcaacatggtggctcatatcgtgtgacaagctctttggtgaaggcagatgcgatttcactggagcccgagattggtctttactcgccggaggttgttgaacggagcaatcagctgttcaaatgggatcccatcagccctgcctattttgtcgcggagatccttctcatcgtcatggatggatggaagagagttttccctcaatattttgaagaatctggaactgaatcgctcatgaccagtttccaagatgggccatttggccacatgaccaccctgaagcctgtggtccagttgagcgattcgagcatgacaccgcggtggttgacacccgcggttccctactgttatcatcctcaaaacatagaatggctgtaacttgctcctcggaggggtctatcatgtgattctaatagtggtggacagatttggcgattgaaattcgagtgcgagttcatttgccaatacttggggatgatcttgtgatctggagcaggcatgaggattgcaatacaaagtgttcgagtcagttggcagtgaatgtgtgagaggccgataagtttcggttttcatgcctagtttccctcgcccatgtatcttctcccatgcatttttaattctatcactataatacaaagaatattcatgttagggccaagcgtatatagagacaaaggactcgacaacacagataaaataactatattctcatacagggacactctccatggatcagcgcaaatcacaccgtggtctcctactaatctggtagacttcagcccatacgctaaaatatgccagatcaaagatctgaagctgctatgactattacctggtcgtcataaatatactcaaatcttggtatatctaaatttgaacaccatgtgatgcatgcaagagaatcttcagtacttcagtacaatgagcatttactgctggactggtgataaccatcttttagcaacccttctgagtgaaaagaaaggtctgatgttctgcattagtcgaggctatgcttgcattccccatctttcagatggactggtttcgtcgtccaactgtgcaaaaaacaaaggccaatcgttccaatcaaacggataattctcaagccaggccaagtttcctatattattttgaggctcttgtccttccatggttgcgccttgaatcattgtgctgtcatagtcgacttcgtcttgcgaaccttctccggtggcatagtctgctccagagccgcgcatatcgatatgttcttggatcaatttgaggacggaactgcaccgcgaagccaatgtatcatacttttcataatctttgaggatcttacaagcctgttgcaaaaggcccttcaaacgaacgaaagaaaaatgttccactatctgtggggacatttgagctgcaagcagaatagttgtcgccatgtatatatcttataattgttagtggctgacaccgttatgcctcatttacgagagtaactcacatgagacggtgtaccagttcgagggtaatatatacgcttgcgtctgctctggtaaatttctgatgatgaaatctatcatatcctcagcagctttgacacactgaatttggcaccgaaagaccacatatccaatggtttgatcatccgagtacaaattggcaccagaagcattgtctgcctttcgatggcgcatctgtgaaaggaacggcctaaaaaggaggagccgaacagaaagatatctttcaacaaaaattagtccggaattcacattctcgtgtatcaggatacaaaccgggcgcgtaaaatgttcgcttgacgtttcatatgctttgtcggcgtcgggtcttcaaggtccaatggcattcgaaaataagagtgaaggttttcggtccaattgcatagctccgactcgattctaaacaggcttgtgaatttatcgaaggataatggtgagctcaagttcacaccggtgagatttctgcttagatcagggtcggctttggaatcactggagttatagaaggtttctaagacgtcgcctatgatgtgatgtagtcgacagaatgatatgtaaaagttcatattcgaaggcagagttgaattcccagtgtccattgattgtagcaccaaagtatccaatccttgttttgcaacagcttggggaactttgagcgcgcagccaaaagtcatggaagcaatcctatataaaattagcccgcgcattgaaaatatcgactcttcatatcatacctgtccatgataatgcatccattccaaacctgacgggcaaggtcccgttcatgtgggtttttgattgattcaactgtggcaggtaaatgcaagcctagatcttgtgcgatatgaatcgccgtgccaatgcttcggaatgatttctggggctttttgtcgtgttggaaatacaccgctgtaagcaaaaggatttgaatgatttcaaaattgtaaagttccatcagttcataggacattaatccttgggctctctgaaaaaaagcaaccgatgattgatatcgagagagaggtgtttcggcctgggaaactacacaagacatggcaaacatgatattgagaatgcagtgcaaagccctctcgttcatagagatttctccctctttgacccacagagtctcatatgcgttctggatagacgatttgtcaagccaggggtagatattatccacataatcccaatatagactcattaagttgtcagccaccttccttgtaggaagagcaaactgcgtgtcagagggttctctgctagcttcctttttttgcaactttggcaacttttcgagcggtttgggcgaaagtcgacttctttctttccggttattctcagtccctctttttgggcgtgtcgcatttccaacttcatgcaagatatgcgccccgctagatgcgccaaaaagactgccgttagatacgattccgctgtacaagctagcctcatcgttgtcttcattttgagagcagctgtttcgacattcgctcctgtatcttgcctgctcggcgttacaggaggcactgtcgatcgtagccttctctcgggcagtatctgaactgtgtgttgctcaatgcgtaagctgatctgtaggtaatggaccgcgacaagtgagccacaagcaaacatcatgagatgcttggctgctatatattttgaagatgattctattccaagtacttacggcatacttgatgaaggagagactcgatcagcctcccggtatatacatgcttgcgaactttgtttcctttttgagcaaggcccgcatactaccacaacacatatgagcacagtatcgatcgcactcttcgacttcgtcgtttcattctcttacctggtctagcaccatcgcattttgttttcttggctttacaaacgttacatgcgatgctgatcttgcaacgtttcggttttggttctttcgactgttcctgtgaggaagagtcctccatatgaaacgagaacatcattctgcgaccaacgtattcgaaggcagaaccttggaagtgttgaattggcaagtctcgccgttgtttctcggaccgggatttcggcatgtcctattatgtcatcatttgtcccgagttgcgagacacaggcctgtgctgtccaggtctgacctcaaatatgttctcatgaccttgagtgccttcgtaaagcgccgatcgggaaagtcgcgaccgcggcctaaaatccggtatatacagctccaacgtacgattgataatggactccatcagcaagacgtcaggtttcaaccgtctgaatataagcccctctcaaagcttatttggaactgcaatacgagctattttcggcaaagtggcttgaaaatgactgtatatgtaggcttaattgcagatcgtcggcaaatcccgcagaagtgtctcaaatataagctgacacttgcaatataaaaccagatgggttgtcttttcttttgcaattccattcacaattgtcttttactgttgatccggcattctatacatcatggctctctccgcatgtaatgccgtgtcaaacccttcttttgaaaccggcatcctggctccatggcatccatcggccgtgaatgtggcccaagtaagcaatggcacaatcgcatacagtggtgattattacctgtacgaatctccctccctgtccagccaaactacaatatcagatactaacgaagtgatgtgtaccagtaaccttcaaaccgcagtaggaaaccgcggcaacaccatctcccagggcttaagacacctcaagcctcacacggaatacaaattcagtgctcaggctcaggttccatcgccttccggctcagagtactgctcggtctatgtttacgttggccgcaatgcaacagtcggtagcatcgcctcggtacagctgttcaattttggggagtggacggaggtcacagggagctatgtgccaaagagggagaatgagatcttgagtattggcgctgcttgtgattcggaggattcttcttatacggataatgttttgtttgatgacattagcttcattcccaatgattgtgcgtatggtttggcttagaaatttacagaggaagcttttgttgcgcatatatataccgtaccaagaatttctagtttcaaataaaaactcccgctttatatatcctcaatcaagaactttcacggccatcccatcattttgatcactgacgaaaactgtgaagaggatgggaatcgaagataaagaatgtatgctgagaagtatctcactatcgacacagatcctccagcaattccaacatgcgttgctgcaacttcacaagctcggacttggaaattggcgatgaactggttccagttgactcgatctggcttcctggatgtgagccctctgtgttggttgggccatcttgaaccagctccttccgaagcgtaaagaatggaatacccagaccgcgcaattcggccatgatcgcatctgccatttgcacggccgccctatgaacctttgcatcgtaggttgcaatctctgcggcaaactccttttcagtctaatgacaatcagtcagagcgaataattaacataggcaccgagaacataccgagccatcgtcctctttcacaggggcaccgatcgacctccttgtttagcgttagtgatccgtcgctagtaaaataccgcagagcagcatagtgatagactcacaggactgcatctagctctctttgtttctcggggcgacctttctgctgcttcaataatgcctcgcgggcgtggaaccattgttgttcatgatggtgttgacttcggatcacaccgcgaatgcgcgcttgggtctcttcgttttgacctacggtgcgcatcacatgttttagtgctgcgggccaagttgtgatagtcgaagagtcagagtcagatccagaagtagaagtggtggacggtctcgttgtccttggctgcagcggtcgtggatcctccgagggcttggattgagaggatttgatttttggcggttgactaggtgttggtataggctgattagagcaaccctgaccctgagaagctagactagacaaggtgctgaggactgagttcaggtccgaggcattgtaagagccgtctcccatattgaaatagagcctttcgataagatatcgtgggatgtataggttactccgaagtttccaattaatatatcgacactgggtctgaattgatatataaagattgagaatggcgagtgaagatcgatgtagatgtcaaagtgttccaaagacggtcgacgtaggatacatatgcagagcaaggatggagaaggggcgttgagaaagaccagtcaattttggcataaagaataagtggtataatttattgatcacatacaaattacaaattccccaagatgagaggacggaaaggaatgaaagaagataaaagtgatcagttgaagctgttttgaatgtcttggcgcattcccgtgctgaaaatttaccttcaacctgcaaatccccggtttatcaactgcctccagatccatcaccccaccacggccctccaatcgcctccgtccaatttccagtaatatcaatctgattttcaatccctatcttcaactctccccccgaaaccgggaactcccaacatgtcccgatccgccgcagacgcaacgcggttcacggccaccgggccctacgcccactccaagaccggcggcgcgaaccaggcctcagactttgggaagaagaagtccagcgtgaagtcatcaccaaagcaacttggcccgaatggccaaccggagacacccaaggagaaggtggaacgactgcgagcacaggcacgggctgctcggaagacacaggcagctggaagcagtgcggaccgatggattgagtctgggcggaagtttgccaataaagcacacaagggaatggtttactcattgattgccgcgtccggtacgtttcctgccctgtgggatatgagcaaaatactagcaacacaacatacgatcctccgaagtccgagtcagcaatgacaagcaacggacccccagttgatccctactggacttatactaatccttctatgttataataggtgtctgcggtgttcttacagtctactcaatgatttcgcttacgctctataaccgccgccaacgcacgctttggatcgaaaaggaactcaagacccttaaggatgccgagatcgcctacgccaacggtaccgcaaccaccgagcagcaagagctcctgaagaaggagaagatcggtgaaattatgaagcagaagcgcgaggaggagaaggcacagaagccctgggccaaggcgaagcgattcctcttcgagaagctaaacatggaagacagcggtgccaatcctgcaccaacatccgcgtcagccttggctatcgagggtgccgacaagggccaaggtagtgttatggaggccgtgcaggccaagcaagctctcgatagtgctgcggcgaagactggcgctcctttgcccggtcagttggatgtgctggctgagaatgtgggacaggctgcgaagagcaagacatcaagctggactagctggttgacggggcgatagattggggcaacctttggtcctccaagcaaacaaaaagaaagaaggacggactggatgggctggcatgatgccataacctgtcctcggatgcaatgctgatctgatttcatcatctaccagcagacataatctggacccatctctctccctccgccgatcttcactcctcgccatatgcgataccttttctcttgcatggcaagtcgcggttttttttttttaaatcgtggcctgcttccattcttccagggggtttacggcgttttcttccattgtgtttctggaatgtgttcctagtcagtatggtctttcctgacactccgaagggagtgaacggccgggcttccatgtatatcgtgtacagtacatagatctgcttatatctgctctcatttctactctatcctcaggtcccacctaaatagtacctacatatacccccacgaggatacaagcgcccccacgacccgctggtgactcattcctgggcaatgatttcgacctaaataggcccatctaacctaagtttgcgcactaatccccaaatagggacggacccatcctcaacaccggagaagcgcttagccgcgggctaacaagtggagcagaaaaaataaaagatccttggagtacggagtagtacaccccggagaaaaatataaaaagcagattcagcccttgatcacattcctaaactttttggccactcatactatgaaatcgtcaacagtcccagcgaaccgcaaaccccccaaaatgttcttttttgacaccagctacacattcacacatgaattccaagggggtttcccaaggaacaagcaggaaaaaaaaaggtacaaaggaaaccgctgaaaacccgagataaagaaacaacaggtaccgaaacgaggtatctatgccagacccgttctccctcctctccgcggaagaagggctgtgaaaatcagagacaaaaagggcatgatctacagagaaccgaatccctctattgctgcgcttttttggcagcacgacgagcacgaacaccatcggcgagatcctcgagcacctcgaccgtcatctcccagttgatgcaagcatcggtgatgctgacaccgcggaggagaccctcgggtccctcggggggaaccttctggttaccctcgtagatgttggactcgatcatgacaccaatgatggcagtctcgccctcacggagctgttcagagacagccttggcgacgacgggctggttgaggtggttcttgttggagttaccgtgcgagcagtcgaccatgaggacctcgcgcttcttcttggagcggagagcctcacgggcagtgcggatgctgtcgcggtcatagttggtgcccctgtttccaccgcgcaggatgacgaagccgtgctcattgccggaggtcttggtgatagcagccagaccctgcttggtgacaccgaggaagcggtgggggtgcgaggcggcgccgatggcatccacggcaacggtcaggttgccatcggtgccgttcttgtagccgatggggaaggacaggcccgaggcgagctcgcggtgcagctgagactcggtggtgcgggcgccgattgcgccgagcgaaatcaaatccgctaggtactgtggggagatggtatctagcatctctgaggcaatgggcaggcccgtgctcgtcagatcggtgtacagcttacgggacacgcgcagacccttgttgatgttgaaggtctcgtcgatgtcggggtcgttgatcaagcccttccagccgaccgttgtgcggggcttttccaggtaggcgcgcatgatcacgcagagatccttctccagttttacggaaagctccttcagccggcgggcgtactcaagtgcggtgtctgggtcgtggatggagcatggtccgaccacgactagcaggcggtcatcgcgctgctcgatgatctcaattgcttgattccggccggcgcggactgtttcgatggcacgagcgggctatacagacaattgttgtcagttggtgtgcttgtagttttgccatgtcaccgcaaatagcggggtgaaaaaaaatttgtgacttaccgcagggatctcagtctgcaagaagtagggtgacagcaatgggtcgtatccgaggactattaacacaaagatcatcagtatctctcacacgcaaattggctctggacacaattcaacataccacgactgtcctcgttgacttcagtggtcttgatgaggggcatggtgatgctcaaggaacactggtggtgattagtatagattatatagaagattataaacagaagatccccagggccaaaatgcaatttaaagcagaagaaatgactcacaaattcgaggtgtcgaggaggaaagtagtgggactaaaaaaataagaggcaaaagtgggccgagagatttcacgggtcaagggatggttttgagtacttctgtgtactgtgctatttatgggatggttttattagtatttggtcttctcatactcttctcactattggcttccaacatatgtataatgtatccaagctgtactctgtacgggggatgagatctagttgtcttggctggctggagaatatgagacgtccaatcacgggaccggagatgaccacaagttatacatcgcactccggctgacctgcatatcatgtcatgtacttctgatatctgcagcagtcaggagatttccatgcactagtacatggcgagaaaatcaagaattaaacagccagctggcaaactccagtttcatattccgctggactcaactagcagaaaatatggtatatcaaaacattgccttgaagaccacagcctaatcttttccaactttgaatattgaacctccaagccaggatcacgcacacgggctttagctactacagcagtctgtatacaaagtacatttaaatggccgtcgccggttcctcgtaatcttaaattcgcccgactagaaatggctttgacttaacgtctgtaaatgacatgaacgatgaagacctgtcttacaactttgcttcttgaactactcaatttattctcatactgcactatgcacctcaatctctttatttctagacccctctatagacctgctttgagcgttagtagttctatcaatttgcaattattgcctaggcgacctctcctttgatacctcaaccgccaggaacacaacactcaactgtcgcacccacgtcactcttaatccacctataatactctacttcgacatctaaactcatctattttttttttcttaggcttgccttcaaatacttgttctaacgcagattggtttactggcagtattgttctccaatctcgaagtgggacaatctgcagctctttgttctattgcaatgggatatagaattcatgaagacagaccttgattcttgttttgatgttttgaagacttttaattcataatcgtcacaagtggttacctagtcaggtcatatcctctaattttgctgttatgcaccccatgaagtgttgacaaaaaggaggtaactacactctctttcatgtttgcttctcgcacgctgctgggtttgactgtgattgtccttctctctctttctatctgtttacctttgttttcaacttcccctcttgatttttatccttccttttcttctccccccgtcatcttccatcaccttcaattctctgactgtctacacttttcatctctcttcaagcatcttcagccgcgatgcctggcaacgctggaagcaccgttcctttgcgcatcagaatgaagaaaaataagcccaagaaagttgaatctgagatgaccgaattggcccgcgtgcctcgcgcgccacagataccccagaatgagaaatcctaccatgttcaggtaaacactggtcctgacctcggaatcacactggcatagcctgcctcgtctattcgcgcggcacaaatcccatcttctagatactgataattatggccagggaatggtgggctgcgggcacagctcgactgcgcatggtccagccaccaagggaaacggcgaccacatagctgtctctcccgagaagaaggacggaaaggtactcgctactgaccgtcgcttccatgccgaaaacgagtatcccacccgcttcagcttgcaagacatggaaagcgacatcggcaggtggatctgtcttgcttgtcccctttcaacccgcaaatgcaaggactgcaaacagtacgaaggtcacgaagactccctgatcatcgccattcatggagattgtgttaccgacaagaccggaaaacgttcagcaatgggattgttctacggccgcggcaacaccggcaatctctccttgccccttccaggcaaggacgaccacagccacacgacccagatcgccgagttgaccgcctgcctgcgagcattgcgcaatgcgactagcatcatcgaggagcgccacagcatgatgcgcaaaggcaagctcctcatgccgctgaatgccttcgttatcaaaacggactccgagtatctcgtccgcagcttgacggagtggttgcccaagtggaagaacaatggatggaagacttgcaagggcgctccagttgctaatgctgacctgttcaagttgatcgaaactggtatcaacatggttgagttggtcgtccaggttaagttctggctcgtgcccagggcgaacaacttggaggctatttgtctggcaaaggtggctttcatcaaatgatgagccaggggatccatcgatatgtccctcagtagggatatcaattagttatctcaggatctctagtttaatccaaacttctatgatatcaaattcgggaatgtctcgattctcggcttggcttccggttccaaagtgccgaaccgaaatagctgacataagcatccgatgggctcccgatgtcctgtccagttcgaggtgcatgtctatcattaggattattcggtattgtagaatctccggggagaatgtgtagaggctgttagaaatcgacgtacaagactaggaacatcgacttgaatcaacttttctccccacatttcgcgggaaaccgcttagccgatcttcagtgccgcgaccactcagcaacggtagtcgaccaaactacttccgaccccggaattttgtccggcatttgcctataagtaatattggtgtccccgggggagtttggatggagttgttgccggtttctcgcttttctctttcttgcatactttagccattgtacatatgtgagtaacagtccgagctgacattcaattcgaaactgacggcgccgagaaagatcagaaataccttgaccatcggtatacaactttcaactaattccaatccaatcaacctacaaaaccatggcttctccaattccccgcggacttcgccaagtactccagaagtctcccaatgacatcgtcattctctcctcgctgcgcacacccgtcacccgcgccaagaagggtggtttcaaggatgcctacccagaagagctactagccagcgtgctgcaggcaacactgaaggcaaacccgaacctagatcccgcccaggtcgacgatgtgctcatcggctccgtcctgcaagaattaggcggcgccaaagccggccgcatgggtcagatccacgccggcttccctcactccgtgcccttccacacgatcaaccgccagtgctcatccggcctagcagcgatcacaaccattgctaataacattcgcgccggcgccatcaacatcggcgtcggcggcggcatggaatccatgacccgcaactacggctcccgcgccatccccacagtcctctggcccgagctgaaggagtcccactcccaagactcccgcgactgcatcatgcccatgggccttacctctgagaacgtcgcgtcccgctacggcatctcccgcgcagaccaggacgccttcgccgtggagtcccacgcaaaggcctccgccgcgcagaaggcaggccgcttcgactccgagatcgtccccgtcactactaaaaccctggacccggagaaccccgatgcccccgccaaggatgtgaccgtctccaaggatgacggtatccgccacggcctgtccatcgagaaggtgggctcgctcaagcccgctttctcgcctaccggcgccagcaccgccggtaacagttcgcaggtcagcgacggcgctgctgctgctttgttgatgcgacgctctaccgccgaggagctgggtttgtctggtgccattaaggcgcgctgggtcgcgtctgcggtcgcgggctgtgcccccgatgaaatgggcgttggccctgctgttgccatccctaaactactgcaggctgttggtattgaggttcccgaggttggtgtttgggagattaatgaggctttcgcctcgcaggctctctacagcattcgcaagcttggtatcgaccaggctaaggttaaccctaatggtggtgctattgctatcggtcaccccctcggtgctactggtgctcgccaattggctactttgcttcctgagttggagcgcagtggccaggaaatcggtgttattagtatgtgcattggtacaggtatgggtatggcgggcatgtttgtccgggagtaaattgttttacttgctttgcacaaaatgttcttttatatctttcccttcgtagcatgataccagcggtgtatgtgtatttacagtttgcatactatgaatgaatacattgaagaatatttctcattcaacatcaaacgtggcctttttttaaagaaataaaaagagacagactaaatcactacatgcaatttgatgcgtaaaatgattgatttgaattattaaacctcgccttgaggtagtgaggaaaaaatgccaagcatcaatataaccaacacgtgactcgtgcctttcttgaatttgtttctccgtccgggccaactccgccagctcgacgctcataaagaacattcgcgcccacctcgacaatgcggccctcaatgcgcctccctctgcgggaggcaaactttgtctgttccagctgcagaattcagactaccccccgtatctcgccgctcggtcaagtccgccaatatgcctccgactcccccggactcctcgaacgcgctcggcgcaagatttggggcaccgacaagcccccaggcccagcagacccctacactggaagtcagatcatgccaggaactgatctggcttctggagagccggtagcagaggacgcattcagtctcgaacagggtgaagcactgtctgaagaaatcgatgacaacctgacctgggagggaatgcccaggattggttatctaccagagaaagaatggcgtcttcagggttcaaaggggccagctgataaagtcaaaccgtatgtttgatccaagtcatcaattcgatgcttctacatcctggtttgattttctcaatggatttgctgacaatgtccttcttgattgatcgaacagatggtactacaatccacgacctttaccatacatgaaggctgcgcatcaagctgccgtggagattggtctgatgcaaatgttgttggggcagaacgtcaccgttgttagcaacctcaacctcaagaccgaagcacagctcgagtcggttaagatcgaaggccagtctggtaactggggcgaccgtctccgcttccccgatgtcaaaacaatgaatatccttctacgccatgcagcagggagtttgaaaggcaaagacgccaagatcgctcaccggaaattgcaaaagatagctggcgagaagggaaatcgcctgtatgacgcagagtccgagggtcaaatgcagaacagcatcagttccctgtcactggctgatggaaacatcaagtttgttgtacgtattttcccttcgacattctcataaccaacattactgataaccacatctcagttcttcgcccgtctctccaaattgatgtctcagcatattcctgaccacatcatcacctcttccgccaccacgagtgatgtcttccgcgcacaggaggcacttcacaaaaagactactagattgacaccggtgcttctccatcaacttatggacaagaacggtgccgctcaattgcctaacgtcaagattctcgatgttcgccagacccgtcatgaccacgatgaagatcttggccgcaagaagcttattgtctctacgctctacaagaatggtttgatcacaaagagcctgggccagaaacaaccggcccattggaagcaagctaagaagactgaggcgaatgcgtaagcctctccttgtgttttgtagaatgttggaggcatacttttccctttatctgagagcaatcttttgtacattagaattgttgattgaattgcatttttgtcctttgtgagttcagataattggtatgtacggtatatctacctgtcgactcgtccaacataaaacgcaatagtcatcatcaatcatcgaagaacaccaaaagcccttgaacaccggaaataacactccttccatgacttatctcacattgaaaagcaaaggcacttcattcaggcctcacgtctacctgcgcagcaggaagaacacaatcaggtcatgatatagaaaatcctcttgtcatgaaatcacgattcttggacccgccgtccttcttcgtgaagagactgtcgagattctcattcccacccatcatcttccggcgcttcttcttctcattctcctccgccaacacacgggcagtgagcgaagaagtagcggcgttcttgattccattgctagaagcagtattaggcactggtgtggaagtgttgcttcgacttttaggatccgaggattgcttaggtactaccaatccagcaggctctatggtaccgggagcatcagctactccctccgcggaggcgttcttcttgcgcttctttgagccgggggctttcttgagggaatgcgttaggccttgttcagcgagtttatggcctcgcgcaatcagacgttccttatcttcttttttggtggtaaggatgttaatgatattgtcttcgatgtagggttcgttgcactagcacacacacgtcagccactatttccgctttgtatcaaagacatgattcttacctgtaagcacttgtcgcctttgagctgtcggatagcctcctctgcaaatacatgtccacacggcaccaggtacacagacttcacactcgggcccaacggcttggcggtgaccgggcagatccagccctcgcgacgctcacggggcgcataagcacggcctgaggggtgctcggggagctcagtgtcgatttcgaacttcatctcaaccacatcccggagcgacttcactcgcccgcatagaatctcctcgcagtctgccttagagctgatcccctcgacatcgtcgccgggaagcaggaactggagaatggcgtccttgttataaagatttccgactgagtctgatacaattggccgagagagggacttgtgtgagagcgggcaagtagtccaggagtgctcttgctgctcgcgctgagtctcttttacttgcgccgtgctcggggcacgggctgcctcgcgaacgagctcgcggcgagtcggaatactaaaaagctttgtgttagaatttttgagtctatggcacatttataatagagtcgcttacctgccaccatcattacccatatttgcgatgcggttgtaaaatgcccccgacttcgccacgataaagttggaaagatagcgcgctgactcagcagcgattagatccagggcccgctatcaacagctggccagaagctctctccgcaactcgacaaacaaagctcaatgcctcaagcatgagacttcctcagtcgttattcttgctggctgccgctgggtcggcggtccaggctagtagtgacaagcctgcccgtccccgtggcttgggcccagaatgtgagtatctgaaccctgactttctagatccattatttgcattattgtttgcggctggttcatgtagcagtgatctatgataggcaattgatcctcttatattagagattacactaatatagtatccttagttgccaaattctaccaggactcaacgacattcacctgtatctcgaatccctcggtcaaaatccccttctcggccgtcaacgatgactactgtgactgccccgacggaagcgacgagcctggcacgtctgcctgcgcacatatttcgcgcaattcgccactaacggtggccgaccggcctgggaatagcgaattagacaccgtactcgctcttccgggattctactgcaaaaacaagggccaccggccatcataccttccattccagcgtatcaacgatggtatctgtgattatgaggagtgttgtgatggtagcgatgagtgggctcgcgttggaggcaccaaatgtgaagaccgatgcaaggagattggcaagcaatggcggaagcaggaggaacagaaccaaaagtcgatgaatgctgccctgaggaagaagaaggaccttcttgttgatgctggtcgccagcagcaggagctcgaggaccatattgctgcgctcgaggccgaggttcagggtgctgagctcaaggaacagaacctcgaggctgatctgaagctcgcccaggagcaggaccgcaaggtggttcgtactggaaatggcaaaggtaatggcaaggtcaatgcccttgcaaacttggccaagggccgtgttgacgagctacgcaatgcgttggtcgatgtgcgtcggcagcgggatgaagtccgcgagcgggtgaaggagcttgaggatattctggctaaggtcaaggtggaatataaccccaatttcaatgacgagggtgtcaaacgtgcggtccgtagctatgaggactacgctgctcgtgagcaaggcaccgagggtgtgaacgctgccgtcgaccgtgacttagacgagattgccaaagccgacggtgaagaacatggtattaactgggaacactgggaaaacgaggaggatggatgcaacgactcggatttaggtaagatattccgtgattccttgtgacaccttgtatagcttaccaacaggaactatagtgtacaagctcgctgcttatctcccaccctcgcttgtcagcttcattgaggatagggccgtttctgttaggagctaccttgaagaaaagggcattcttcccaaggccgataaagactcttcctcggaatccaaggccgtgacccaagcacgcgatgcccttaaggccgcgcaagatactgttacaagcatcaagaacaagctccgcgaccaccgtgccgaccttgagcaggactatggccctaactccatcttccgcgcgctcaagggggtatgtatcacccaggatgcgggtgagtacacgtacgagcattgcttccttgagtcgaccaagcagaaccagagaaagggaagcaattctgtgtcgatgggcaaattctcgaatgttggaactacgaccgtagaagaggtcaacgcggctggcgaggtcgtcaatgtcgagaagatgacgattcaatacaataacggccagtcttgttggaatggacctaaccggtcgaccaaggtcattttagagtgcggtgaggagaacaagatcttgaagacggcggaagaggagaagtgcgtgtatgccatgcttgttacctcgccggctgcatgtgcaagtggtgaggaagcaggtaatgttgcgcctcgctcgaaagacgagctgtgacggctatagatctagagatctggtgttacatatgtattgaatgtttatttcacgtgcatctcattcattagaatgaattgcaattcgagcgctttttacccttgtattcttgttccttggtgttaaagtgaacatctgtttctcggtgatcggggttcgattcaatcgacgtatgtcaaagacatctgcatagccctaaactatgagcatagtcgaaacacatgtattggagcatacagatactactaaaggtcatgaatcacacaatataacatcttcatagttgactaaaaattaaatcacaagaacacacacaaggtcaaatccgaacctataaacttaacacctcatccacaaggccccaggccctattatccccagatcctagcatacaatcatctcggtcatgaacgatcacaatggagttatctcataactcgacgaaacaatgagctagtttgacagcagtggaagcccgggtctagtgtgggttgtatgggaggaagatggcggtgatgaaggccggtgggttggcttagtgctaggagggtagttagtatatcttttgccctagggccgcatcccactatgagtgaccgttataagacagggagtgagcacgcaggtacataccttgcagctagagcaggagcaagaagtgcactcgccggagcagcagttgcaggtgcaaggagacatgatgaagatagagttggtaggtaaagaaccttgaaaaagaagcttaagagtaatgtttggtttggatgtagacggcttggatagagaaagaaaagtctaacaggggacggatatgagcccagctttatagattcacgactgctacggagtaaattatcccgatcaataatagcgcgcataattctatttcctcgtccatcatgctccctccaatctaagacgctgtaatgtcgccgcgacccgttcacactccatagtatcgcgtggtcgagtcaaatgagcccagccctgcatcccactcaacccgcctgcctatcatgttcttcaagctattctcacgcgctatgcgctgtaaaaagaatactctggccagatgctcaaccgctcgccaagcctatcaggttctacctatgatgtaaacttttacagtccgcccgccctcgggcgaatatggcgcaaaagccggtgagtagattagtatccgatctattttcttgcgaagtctaagtgttatctttctcggtgttttctcgatagtataatgggtacaacatgaccgggttaatcaggctatgtacggagtagctcagattgcgttgtgctcgggccgggttcctgcgaagaatatagctgatccattggcttaggctgaagactaagaatcttgcaggggttcgttttgtggagcaatggtctgcattgtttacgttgcttacacttccagatacggacatcgttgcctatacatgtgtaagttgtttcctttgaacgtcgactactagacttggatatgtttcattgatcatatgttatgctatgtggagggatatgtttctaagacaatatagtgaggtgaataatatatgggataatgtggcagcacaaaacactccctattagtgcgatattaaaatccaacccttctactatcatgccacaatgacggccacgtttcgggcacgacgtagatctgcatgcctcggtccactggtttcgggacgggcctgttattatctcatgagtacagtcataactatgtacaacatgcgtaccatgatgtggagtgtaagtactagaacgaattaggataaacgtcgtattcaaaggaaaaacggagaatacacagcaagtaaaggccgagtgtgtaatttcccgcgcctacagcggtttcaggctgggctattgtcgtggcagcctatgaggcgaagtttgctcggattggggaccttggaggaggggtgctacctggcctcattggcagccctggattacctgagatatgtccatatccacacagtggagcatgccagggtgttctggctgtgtttttagttgtttttattgattgctttcggggtatttgtgtactagaggtgtatgagcggcaagacgccctaggagctgcacctgcattgttggggttggattagctgttagctcccgagatcaggttgaggccggcattagatcatatccatatatattgtacatagttgtactatgcaaagaaaagaaaccgtgcataccaagagacaaggtcgttgaggcatctcactctgtacaatgtagtccgtacgtgacttcaaaacgccgacattgcgcgtttgggcctcctgcggggacagactcattgggatctgactgagaaccaggagcaaaccagccagacaccgatagagtggagaggctgcatattggaagatatcacagaccccttcgaggtgcatcatgcatgattatgataggctccgattcgatactgctcttctgggactcgtgcagcatcgagtcccgcttttaatctcttcttgcaatcagctctgcggggtaccaggtgttggggtctttgttgtagaaaggtttgatgttggagatgggtgaaaatgccgcatcggcaagaaatagccgcagaagccggtcttgaaaggctgtgaagaatatttccgtttcggggcactgagacgatgggatgatcaagacgataggatgatcaaggcaataggatgatcaaggcaataggatgatcaaggcaataggatgatcaaggcaataggatgatccctcggtggactatgcggttaggttggaaataatgcctgatattatgtcagggttcgtatcaaacaagattcttgtggctcgtacagctccttcctccgtaagggtatgtgtcctcctcccagactatatttctttatcgaaatggatgatttgatctgagttatgtactgagatattcctcagaggctatgtatgtcgtcaaaatacggtagctgtccttagttttctccacttaggaggctgttcgggtatctaggtatgtcggacaggccgtttagctcccaaggttgatctaaatgacccaagtttaggatctgatgcccacaaggtccttgatttacaaagaataaaagtggtcgagcagccgcatgtcattcactatggagttatgccatgacacgtatccctgaggaacaccaccgggagctacccaactcaaatatcctccgtctcacttcgacttccgtgctcatattccttgaaagattcgaaccatcatgcccatatgggtgatttatttcttctgaacgggggtcgggtcagctagacgtcatggaaggaagaatgagggcatatcacgtacggggcagttgcaggcgccggcagggcactggcaagaggagccgcagctgcatccgtgatcgcctatcatggtggtcagcattgaaggaaaaaaaatatggtgaagtacgatgagtgacaaccccgctatgaccccaccatttcggagatcaggcgcaaagcgcggttcttcacagatttctgaagtgacatataacatggaagatgaaagtgcttactcattttgtatgtttggggtggtaaaaactggtgaagcttttgaagttgtgttggttgtaaaggcgaggtgggggagagaagggaagaaggatggggccgggatcttatatactcgtgactttccgggatacgtcgagtctgagggtcaggcacctgagtgaattctcattcgcatctcgatccacgttacacttgagggcatatttctgtccccgcttacgcacatagccaacgcattgctttcgagagagtttgcgatcagattattccctcaaaccatgactactactcctatcgcttgcatctgcggaagcgtatctttatctatccagctagactctctcaccgaccattctaaactccaattatgccattgcaaccgctgtcggctggtgactgggcagttatcttcatcgtattatctcctccagcatgaaccacccaatctagatggcctccaggaataccaacagtccgaccacgtgagccactttttctgtaagacatgcggtgcccacgtcttcgctcgtatgcaccctgggggtcagtttctagttgcctccggcttgttagcaaagaatgttcccttggtccgagcggttgagcactggcaaagcagcgatactggtgacggtggactcagcgcactgcttcctagaacggagtctcctgtcacaggttgcagattacatatttcaaccaatatcgaaagccctaaccgagaatccacaaacccagcagaatatatatcaaccagccagcatttgcgggcacgttgcctctgtggaggggttgagttttatatcactaagcccgatgcatcgtccttacaagcctcctcgccatggccagatctcctggttccatactataccgggtctggggcaaatcctggcgatatcaaatggtggttgcgaagtggtggtacaaaatatattgcaggagcctgtgtttgcactagttgtcgactgagcagtggatttcccatccagacctgggcatttgttcccaaatccaacatctttaatgcagacggttcaccacttatgttcaatgtcgggaccatgcagcggcatagaagttcatctggggtatacagggaattctgcagccgctgtggggctactgccttttggcattgtgatgaacgaccactgctaattgatgtgagtgtgggcttgctccaggcacatggtgctagagctgaggactggttagaatgggtaacaaatcgtatcagctttgctgagatggcggtgcaacatgatttgattcatattctagaggatggcctcgagatacattcaaagcagaagtagagtcaatatccggacaaaaacctatgaatgccatcttagcaaccgtcttcacctaggtagtcataaagaagggaggttataggtatgcttcaagaaggcggtgatacatgcggtcgggcaattatgtctgttggcctgtttccttgtctgtacacgtggaaggtgcgaccaactccgtcaccgccttccctctgcctgactttttcggatatcttttttcgcgcgtcgaaactcgaaacacctgattctctttcctccacgcgtctgcatttttgctgcttaactgcagctgttcaaaatgccaatgccttcagttgctccgttccagttcaaaggaaattctaattatcgtggctcgcgtcctaatccacgacatgagttcactttccggtaccagaaacccgccacgtcggaccgaccattgttgtcttcgaagagggaaagcacaccggaacggcttgagggcgaaactaagcctgaactcaaatttgccgagctttctactttaagcgacagcgaagaggcagaaatggacatgtctgatgacgatgccgagcgaccacgcaagagacgtgcgctaggtgtcgatgggtccccagaaaccgctccggcacctgctgcccccaaatggtcgaaccccgatccttacactgtgctacctcctccggccgaaactacaaacaagagggtggatgttgtcaagctgattcgcaaggcgagacttgaagttgtcgcaaagacggacgagacggatgcagtcaagcagaactcagacttcatttctctcggcatggatttcgaaccagaagtttctcagagcaacgctcctgaaaacgcccccagagggccaaaggctcaggaaggtctagatcccgccattacgagtcggaagcgaacccgtgacgatgagctcaaaggattctcccgaaagaccggaaagcctgccagcaggttcaactacgatggttccgttattgatcaatggaaaccactttcccaagagacaggcacgccttggttcgagggcaccccagcatccttgcacgtgggaacccagtcagtactatcctttgcgctctttctcttttctctctaacatctaagctaggctgcataatgagattctcagcttctatcactgggccaagccacaggaattcgaacacatcgtccgtgcagatcttgtcaatcgattggagactgcattccaacaacgataccacaacgtttcaatccgggcctttggctcttttgcctcgggtctctatctccccacggctgatatcgatctggtgctgctctctcatacgttcttacgcacgggggttcgcacattcggggagaggaagggtcaaatttacgcgttttcggctttcctcaagagcacaaatctggccgttcctaactcgatcgaatgcattgcgtccgcccgggtaccgattctcaagtacgtggacaagctgaccggattacgagtggatttgtctttcgacaatgacagtggcttgattgccaacgagacattccagaaatggaaaacccaatatcccatgatgccagttctcctggccgtgattaagcagttcttgttgatccgcggcctcaatgaagtcccgaccggtggaataggaggtttcgctatcacttgcttggtgacgaatattctccagcatctgccccagggccatatgcagcctaacctaggaaccatcttgcttgatttcttgaatttctacgggaagcaattctcttataccacgatagcagtccggatggaccctccaggctatttcaccaaggtaagtggattttggttcgcattactgttgactagccagctgataatgtcaaacagcaatacttcggccaccccgatcgtctcacaatcgaagaccccaacaaccgagataacgacatctcaggtggcacgaaggaaattgggttgatcttgcgagcattttctaatgcccatactgccctaaagaatcgcatggaatatctagcacttgtccaaggatcgaacaagagcattcttgagcccatcattgcggcgaactttgatgaatatgtcgagcaacgcttccaactccgtcaggtgttcatggcagaggataggtttgctcgatacaggaagtcttcgcctccgcctccgccgccgggatcccctcctgctaatggagcatccccccctcctccccctcctatcgacggagccccctcttctttgccggcaccccaagctcgcaaacctgctaaaagactcaaggcaaagttgaagggcacaaaatcggagccagaagatatttcttcggatgacgcacccgggcccgaagcaaagtctgccaaagctcggaagggtgagacaagacgtcagttgtgtcaagagcgtgcggccagactcaaacgcctgaggcccgacctcaagaaacttcccaataccctcagcctccgccaagctcgccgccatgcaggctatgagaccgatgagcagatgaatgcggacttggatagcagagagcagaaacttctcgcctcggcataaatttgagtctccacttccacgcccgcaacgactttcttttggtttctgtttgtatgctttattttgtatgatgataccccttacttcgaatggtttggtgatttggtgatttgcacggggaagagaggagggatgtcagtggcggtatggtggggaaggtgatatgttcgtgtgtgctttggcaaacctgtatgcttattcttctcgttggcgagaagcgcagccaatgaccgcggagatcgagaatgagcattcttctttgggcctgagacgaaaaagtacttactatttaggattctctcccggacttcgacctcgccagattctgttgacttgtccctcggttgcaattgattagagctgtcctgatgttgaattcagttttcgatcttatttgattgagaactagtttgaatatggataagccttgacaatctcaaaccctggatgcccttgtttcatcatctattcgagtcgatccggcgccccaaacgtctaatgttctctcgggtttccctcgacgagtaactagttcttgcagttcttcggtccctacacgggatgctgttagtgatttcaatgaaacccccccgatgattatggattcgcgcccaacgtggatctatgtttgtcggcgtttatctttcttgcttttccctttgccctctccttctcatgccttccttctcacccagaaagcgctagatgcgacttcttggagaggaatagagcatcaggagctaccgggctcgggagcgcaggagcgcaggtcgaacttgcctttttgcaatcggaaggtgggcccatcccacgtgttgccgagtcccttcgtgcctgcaacttttcgtctttacccagaattatggaattacatattggagttacgaggaaacattgggagacgccgtaatggctgtatctcgatctattgcatttatcaggttctatctctgatcctatgcaagctgcttttccacgtctgacggtggtgtcagcataggatccgcctcaatagcggtatcggatatagagagagatggcttccgtccccttctctcctcggcctcgatcctctgcacagcagcaatatgctcctcggataacgaattcacaaagtctggcgatggactggcccagacataatcaacccactctgtgcctaagatatcttgaatttctcgtgccagctgcaagatatgaactccacgcgtacgagaccaagcacggtccgtgataaggtcctgctggggcgtgagtatattcgacgccgtgggcacatcccccgtcgggacctccaagctaggggtaaatggtccaggcgatttcaacttagcatcgaaatacgaggcgtcgtcatcctcattcaaattctcgagcccatcgacgatactgtgccacacgcgcaaagtctcctccagctcagcaatattactaacgcccataacgctgacgcctagccttctccccgtgcccaaattggccacagacaagaacccaggatcggcgtccgcagcccgagcaagcggcgcaccgagaccgccagcccgcgcaccaacacgcagccacgcctccagcgcaaaccgaatcgcaacaacctcaagcttctctccgtggcgcgaagcacaatccgcggcaatacggatagccttccgcagagcttcaggggcgggatggaaatcgcccatcgagccaataggcacgccgtcgcgacgaagcaatcccatccccagcggcgatgcgttcggaacgacatcaacgccagcagcaagtagcctgggtagggcatgcgagtgcagccgcgtattctgcagagtgaagttggcgtacgacatgacgatatcgagcggctcacccgtctcgcggagaaccgtctcggccagatcgctgagcgtgtcgaccgggtagccagagataccgacgtagcgtatcaccccctcttcatcgcggagacggcgcagctcctgcaccgcgacgacaacttccgcagccgtcacgaactccacgtcgtggcagtacactacgtccaggtagtctgtgtgtaggcgttgcaggctgcgtcgcacgctgtgtctaatccattgaggcgagtagtcgaatgaggagccggctatgcgcccgactttagtgaggaggtggtatgtctcccgtgggaagttggcttgcacggtttctgttgcgagggcgcggccgaggagttcttctgcggggccgtaatagggggatgtgtcgaaggcgcgcacaccgcgcgataatgcgcgctggacgagttctgttgttggaagcgcgtaagggtcggcattgtattgggagttaaaggttgcggtgcccattatcagcggaggcagcgccgcggacagtggggtggaggggcgcatggtgtgggttgggaggccaatttcgtcaatgccgaggggctggctatggaggcttgggtattgaagattggtcaattggtgagagtcttttcaaattgtaagtgtatcgactatattttctccagaaaaaaaaggaaccccccttcggctccgcttcggatggcgcaatggcgggggattccccccgaatcgggacatatggccacgatccgatcgatcggctttgcgttacatctactctttcgaaggtttcggttgcgtggattgaatgtccccttgatagaagtaggcagtgacaacgtgaaaatgtttctggcaaggcggcggtggcaaaaagggacaaaaaagtcaatgtagatcccgacaactacgatgcatgtatatgaatcaacaaatctagatcggacattacacacaagttaatgcaagtatatagctattgtacatgaatcctttccgagtgagagtggagaaaaggtcaacggaacgcggcgcatcacaaatgatatacatagaccgaaaggtcgatgagaaggtcggacatgaacaccttcatatccgaccggagatgacgcccgaggaaatccgggggccatcttaagacatcacagagaaagaccccaatctagaaaatcaaggcgtctttctctaacaacccaaacgccatgctatgccaaaaaaacgaaagacgagcagatcgaaaacaaagaagccggttggggccggaggcttctctcgcaggaagtatagatgtgctcgtagaaaagccgggggcccggggaaccggagaacgacgcttattgttgtgttcaattatctttgtagaccttggggttccatccttccttcaattccttgtcgtgcgcggctttgcgctcgacctcgcggaactccatttccagacgctcgcgtgcacgcagaatcttactttgcagatagaaactgccgcctttctcgggattgttcgtatcgaacagtttcttgaaccgagtcatgacatgttcgaggtcgtgttcgccggacgccgggggcttgacgttcaggattttgcaggcttcatcgatggtcacgctcgaggtggtagtagattttccggctgccttttgctgcccagcgtattttccggacgcctgggcttgtttgtaggcttcggcgaaggcgcggccgaagacccgggctccggtcacgacaacttgagagacgatgcggtgagcctagtagtttgttagatttaattttaagaatgggaagaataatgagatgaatgaacataccattgagaaagtgccgtggaggaggcgatcgcgatgttataggttgaagaaggaaagatgagaaggggaaaatttcggctgcgggttttagcgtccggagctccaggcacgggcatgagtatagggaacggtagtatagctagcgaggtcattctaattcgagattgaagattaaaaatgaagtatttattatttactatcatctacatagacatccattctaaaaaagattaaaaattagaacaaaaaatagaaatcaaaatccttcacaccgtatacgagagtcacatgtccacaagttcgatctccccgcagatcttcttagaccgaacatgatcctcactcatcctagacgatgagctcattgtcactctatgacctgtccataattggatggcagctttaggtatgctatttgatcatacctagccttaaacacggtccctgatgaaaaagaaaacagacaaccttccgtggatagactccatgtcgccctcatcgaacacccaagatcatggccagtcggactctcaaccgccgacggtcgctgccttctctccgtcgacgattaccggctcggctctgacctcgcgccagcgctccagtgtcatcgtacatcgaaaatcacctctcctagtggccacaccgccagctatcactcgagccttggcatactcgcacccgttcatacttcctctaaataaatttgttggtatcctgacatggacttctggagacccgtggcagagttttctgctggtatctaccttttggactatcgtgctatatggcgatactatcattctttgggcaggaccgatcctggtcgtggtcacgttgatcctcggcatgtatggacgtcgttactcgcctctgtcgtcaactgcatcaacaggcgaaaagcacaagaccaaggttgccccagatagctcactgcgtcatcagaagagtcttgatgaaatcgttgaaaccctccgtatcttcacaaccagatgcaatattctcctcgaacctctactcgacctcaccgacttcctatccacccaacgtactcccacatcggcgactacaaaacctgcgctgacagctctgttcatccgtatcctcttagtcacccctgtctggatcggtctgactctacctccattctacatactcaccacacgccgcgtcgtcatgaccgtcggcactattgttttgacctaccattcccgacccgccagggtgtcgcgtgtcattttgtggcggtctagagccgtgcgtcggctgtgtgccgcagctacgggcctctccgtcaccgataccccgagcagtccacaaaaggccccagctcaagccgaaggcgaaaagcaaggcttaaacatttcaacgcggcggcgtggaaacaatgccggtgtgcggttcacgtttgttgtctatgagaatcagcgccgctggctgggtatcgggtggacttactcgttgttccccgcagaacgtgatgcctggacagacgaacacatgaacgcagtgaatcccaaggattcctttgagttaccagaagttcaaacaggagatgccaaatggcgctgggtggagggaagtgaatggcgcatcgaaggagcggacaactttaatggaaaatcggactcgaaggggtcaaccggcgaaggatggatctactatgataacaaggttggtgctttctctctataccttttgtttattatcttctaacggaactctagtggaatgacggtcgccgcggtcaagacggatgggatcgctatacccgtcgacgcaagtggtaccgtgacgctgaattggcggacctatcacctcaagacacccagagttcctccgcagaaaccacttccgggctcacgcgggcactcgaaaaggagaaagaacagacgaacgacgacaacgccgacgcacaaagcatcgcgccatccacctcctccaaatctcaacgtcggcgctggttcagcggtacctatgacaaggaaatgacttcccctagcgggccgcccgctgacagtgggcgtgcaaatgcctcgcgacccatcagcatcaaaaatgcccgtaaattgtctcatgcccgcgaaggaagtgtgacaactagtgacagcgccagtttgcgcgagaaggagatagcgaattcgcaagatcatctcgaccggtggtcaactcgagctgcgggcgggacggaaagggccgaaagggaatgggggctgagcgatgaggtgaacatggggttgagttgatcgtgcgttctacactcatgtatgccatcatccttgctcgaattccgccattttctacctaaggcatggccttatatatccttatatattcttattgttctttgagcgtaaacggcggaattgtgaattgccttgtcaagttatatctttttgccccaatacgtaaacggtaatggacggaggacggagtagaggtgaggctatcgcaaggcttataggagcagtggacggtcaaaatttcacattccctcagattcaaggtgtgaaacgagggcaaggccactcatttagtataattaatgcaagatatgtacatcttgtctaatattaacaggattcaggaatagaggcacctccaagatccacgtccgggtctgttgcaaattccaactcaagagcaaaaaaccttgttcagatcgcataacggaattctgagttctcacggtctgttaggtccaaaaactcgtggttttccggaacgacgtaagcatcacccaatgcctccctctccttgtcgcgtcggcgattctcccgttgcgatatccaccagataatgcacaagtcgagcgtgacgatgaaatacaggatgcagatagagattttggccggcaaataccctggggcatctttggcttggaaggtctgtggcgagatgatgttgccgacagtataggcgatcgtctggatgcaggacacggtgatcttcttagttgagccagccacattggtactggtgagcccaagaatcgtcgtccatccgagtggaatgcctccggtgaggtagtatcccacaagcgccggcaccctgttggttgtcgccattaaaagcgaccccacgattcccacgatatgggctacaatgcaccagaacagtcgtcgttgtgtcttcattgccagatatgtcaggccaatcagaacgaccacctcataagcacccaggggtgttacaagcaggagactttccgttttcgagaagcccatgcccgttaccatgatattcccgaaactcgtggcaatggaattcggcacatttgccgccatgacccagaaggcgtagagccaggtgtgcgggtcggtaagggcttcgtaaaactgggcttttttgaagacattgcttccgatgccctgtccgttaccccgaagacgctccgcgtgcattgccttttcttccggggacaaaaagccggccgttaaaggggaatcgggcaggaggaagaagaaggagatgccggtcgctacggtcagcaggcccaagatcaggaaaatgacctgccaacctcgcagagacgcgcttggatccccaccgatgtgcgttgctacgccgtatgcgacgtagccgccgaacatctgcgcaaacccacacatggagaaccacaggccaacgcggaaggcctgttcctccttccggtaccactgcgaggtgaagactacccaggcaggtatgatggcggcttctgcggcgcccagaagcgtgcgacagaccatcagggaggcgaatgacttgcatgcggccatacaggccaggatggtgccccagatggtcacgttgacggcgacgtattttgccagggggaatgattgcatcacgcgcattgtagggaaggcgaacgccagctgaccgaaaaagaagatactcgacacccagttgaattggttgcccttgaggttcgttgactcgcgcatccccgtgacactggcataactgatggcaattttgtccagatactgcaggaagtacacgatgcagatcagtggcatgatatacatatcaatcttacgcaacagtcgtgcagatgctgcgggatcgagaacgctcggcgaaccgccttccagtaactgcaatgctccatcgcctgatgtagacttgacatggggggttttttcgtcgagtttgggcgagacgctctctgctggggaaattgttagagcggtcatcctgacggtagtagcgatgatatccaccaagtgggaattcacagaagagacttacgtttgccttaagtacctcgtaacggctggggatttggccaccaatatcgatgggctagcacgccatcaccctccgagctgtcacaataaatcctaacagttgcgatttttgggtcgtaagtgattttcttggccgtagtgggtactcgcaagcgaggataatttatctcaaccggagccccgagcttgaccggtgtcaaccccagcgatatagcaggttgacttatggagtaagagaattcaaattgaacatcgcagcatctcaccaggctagatatagcccaataagcattctaaaaggaaatgcttagtaaacaatatcattaacaggatccgttacacgtgggacccaccgaaaacaagggtctgatcccccggttacccactacgggtagggtcggatatccccggttcccaccccgtaagccgttctatacaaaaggtacataaacacagcataacattctcaaccatggaaccctcaaggtgtatacatctatagatacatgtgtatataagggttccattgaactacatgtactcctaagattggatatagatatagaaaacatacttgatatatatttcataacaatccgatattcgtatcattcatcccaacataaaccttggtccctagctcaataaatataaatacaagaagactaaaatctaaaccgccgtgactatctatgcaagaatcaactcccatcccagttcctccacaatatctaaccaatgcacatttctctgccgaccaatcccagtaaaccgagctttagaattaacatcctgtctcgcccacaagatccccaataaatcctttgcacgcctaacattcccaatcccaaagttatcctgtagcttgcccaaggaacgaagcacaacctctctgtccgctacatcatcactctcacacccgcagataaagatagggaacgtgagcgccgagtactcgcagtggtcacccagcgggaaggtttcaatgcggccaagacagcggtagacagcgacatttttcggtgtggagatgagaggaagccagtcttgcgctgaaagagatgggacctcctctagctgggcgtttacaatggcaccagggctggcagcgggaggggtattaatgcgctccatgatcgagtggagatagacaaatcctgcgtcacggaagcattcagctacgagttgaagccgagttagggttgctgttggtgttccttgggggattgtgtagggaattgaagtgtgagaccaggcgaggagggattcgtttctgagatgggatgttagtgcggatgttcgactggactatttcttctgtaaccggagagagagagagagagacaaacatggatgcaacactgagtcgaagagccaacgtatcagcttggagagaaggcagctctgcgatacgggcacataaattgaggagttcctctgtatatccaatatagatatccaattttgggatgccgatatcactgtcgacaagaatatccgtagcagtgatacaattgcggttgctgattcggcccatgttataggcatacacgaatctagatgttgatatattatattagcgttcggtaatataccttgcagggtgtcatacatacagtccacgaaggaactcggctgcatctcgatccattgaagcgaatccaccgcgtgaaacgatcagacgttgcaatgcattgagatgaacaacccactgcttaacgctaccacgcacgatctcatatttgcacaatagaccgactgctagcatggcatcgtcagggaacatctccactgaacacttgtctagtgctgtgcggagtccattgagcgttccactataatatttgagtgcagctgtatgtgctccaagcccttgggagcgatttgctagatgaagagcagagatggcacatacagccttcatcagcagaggtgatgacattgccctggggatcaacaacgatcgaaggggattatcatggctttctagatttgctatcagtcgagatccctgctccatgtgatattggaggaagtgagtctcatgtgttgtgagatgactgatatatccttgaagctgtgggatcactgcgacagagttatgcaaatctatagtcgggctaggactgtattcttccgcatcttcaatcgaactggtagcttcctcatacgagacatatcctccaggagaaaatggaacggaccagctcaaggaagtccccggcccaggggataaacgagtctcaagccatgcgtccgatgatggggacggtgcaggcgaagggaactgagatggcgaggacgcactgagccgtcggcgttttgaagtttccgtctgtgagaatacctgcgccgatggacttagtggctccacccatatagagccgtagccctcgcatgcccggccttgcttgagacaattattgcaactgaccaaatcagttacgtaactaaatcaaattctaactaactagcacgcaccttggtttggttttatcacaggccttgcgcctctttttgcaggtgatgcatcccgagcgagtccatgccgtgccagattgccgtttcctaccctttttcggggcggaagtgggttggccgggtgtgaaggaagacgattgcgccgagctattcacaggaaaggcattcatagtgtcaaggggcgcctgggggatatggagatgctctaacaggtactattgacagcatgcttatcgcagatattagacaaattcagacatgcatgcgctgcgcagaggaagatagataataatgtatacggcagtgccctaggcgctgatttggtcacatgggcggtgtaccgacggtaacatctgccgccgccgaaaagccggcccggcacataactaatggggagtagggaacataggaaaaataggaaagtaagaaagaatataaaatttccgccctggtaaccggggttgtgtgaaagggagtaaggcctcgctgcgcgccatgtgctgtactgggacggtcgtgaggagacaagaagcaacaagaagaaagacatggcgaggcagacgacaaacaccaccactcctttggattaccctatggtctctgagccacgggggttttctggcaggctcttcgagacggaagcgactaacgggctcgtctgccgataatcttcaaccactcccggccacaacggcggacatgctcgtcttcgcaagcacgctgcttattagaaagcggaattaccgctcccccgcctaacgctagacttgcagcagaatcaccaggtatcaggaatcgtgatttttctacggagtagattccgtagtcattgtattcggtgtcacgtgctaggtcttgcaaagaagagtgcattcagttcaaaatgacgaagatagagacctaaagatgaagcaagtgaagaagcaagagatggactgctcatatagctggcgcttctgtaaaatttgcaaacaatctatggaataaaaaatagtaagcgaacgagcaaatgaacgaaaaagcaaacatgaagcatctgatagcgatctatagtagatcgtgacatccgggataccgtagtagtatcaaccatgataccatggcttcttgcttcatactcacttattacagtatcgaaaatgcggcattgtaccattgctacgtagtgatccatacgtaagagaagtatgtatcacttatcgatagcaaatcacactaaacctaatttggacaatttcacgccgaccccacaattgtggattagagatcatgtgactttgcgctttaattgatctcctcccatgctaggatcaatcagtgtagatcattgagatagttgaattaaattaaaatcaaatttgtcagttggtcgagtcttatcgctatgagtttaactccgtatctccatctttactccacgttgccctaatctatcagagccaagactcttcttctccaactgccctggtttttttacccaatcaggcaggtccagccacaccttatgtaacccgataagaggcccggggcagggcccctcaggtgcgagatatttcaatgtacaacattgggggtaaattctctcattggatacctttcttgccctctttccttgtcccctcccacttctctgtggattcgtgggatatttccactctaatacttcccatagccgcctcagatctctatttctgaagtgtaccagaacgccgccaaaatggtaaccaaccacggcccgcacccattcgacccaatcacaccggaggagatcaagctcgccgtacgcatccttgaggcggccttcccgggtgtctctctgcgctacaagcgaattgatgtcaatgaacctatcaagagagatgttatcgcatacatcgaagcagagcgtctacagcggccgctacccccacctccggcccgtctcctctatgtgctcttccaccgcctggacaccggcgcattctacaaggctatcctcaatgccgacaggcgcaccattgtctatgccaaggagcttcccaaggaggtccaagtacgcagagcccctctccctcacgatgcaagcaatgggttaatcaatatttccgctctatagggtcccattgacatcgatgaaattgccggaattgaagagttgtgcatgaagcatcccgccgtactagctgagatcgagaaattgcagctgcccccgggcatcactgtttgtaatgacccttggatgtatggcacagacaatgacaacgaggaccgacggctctttcaatgcttcatgtacatggtcgaagtggatcacccccagaacaatcactactctctgccttgcaaattctcacccgtgttcgacggtctcactcatgagttgatccgtatggattacctgcctggtggtgctgatttcgagactacctctacccagccttggaagcctgtcaaggcaatccagtacgctcacgacctcttggatgagccccttcgcaccgatctcaagccatatatcgtacaacagcccgagggcccttcttattcggtggatggcaactccgtctactggcagaagtggcgcttcagggtggggttcaacgctcgggaagggttgattatctacaacgttacatatgataacagaaacatcttgtaccgtttggccgtttctgagatgactgttccctatggaggtgagtcggattggagcctcatcacccctaacccccggtagatctgacgcacatgcatctagatcccagagccccctaccaccgcaagcaggcgtttgatgtcggtgacactggttttggtatgaatgccaatcagttggctcttggatgtgattgtctcggccatatcaagtattttgatggttaccgcaacgactccaaaggcaacccactgcacctgaagaacgtgatttgcatgcacgaacaggataacggcttgcagcataagcataccaactatcggaccggtgccgctaccgttgtgcgcaaccgccaattggttctacagatgatttgcactgtggccaactatgaatatatctttaactacatctttgaccaagccggcaatatcgaattagaagtccgggccaccggaatcctttccaccgttccattcgacaacgagaatgggcaaaccgtcccctggggtactaacgtcggtcctggtgttatggctcctttccaccagcacatgttctccctacggattgaccctgctattgatggatttaagaacaccatctattacgaggatagtgttcctatgccagaagatgagaataatccataccttgtgggctatacctccgagtctacggtgatgcacacggcaggcacagcaaacaccagcgtggatcgccaccgcgtcttcaagatccggaacgacaatattaccaacccaatcacttataagcctgttgcatacaagcttatggcagctcctagccaaatgcttttggtcaacaagaaggcccacggcttccgccgtgctgagtttgccaccaagccgatctgggtcacaaagtaccaggatgatgaactgtacgctgcaggcgagttcaccaaccaaagccgccgcgccgagggcgtcgaaacttgggtgcagcgcaaggacaacgtagagaacgaagacgtcgtcctttggcatagtaagcattccttcccacgacttgatctgtactgtataactaacaacccctgcagccttcggtcttacccacaatccccgcattgaagacttccccgtcatgccgatggagcgcattagtgtcatgctgaagcctgatggattcttcaacaaaaacccggctcttgacgtccctcaatcctcccagttgttcaacaaatcttcactctacccggaggagaagcctgctgcctgttgtgccggagcttcgtctgctggccccaaggccaagctgtacaagtgcattgactagctcgatttcttttgaacccatagataccccatacccccatcctacggttcaagcactattctttgttttttttttatgaatcggcttgatgactcctttgattttcttactacccttttcggttggccttaacgataccttatgatgtaaataccacctctataaacaccatgtttcgatcaatattttcctacatttaatgccaaatatatcgactgcaaggggagcaagatactagtaaaattgtggttatatctattgttgaattactttgcacgtgaactgatatatattgacaacggagtagtagataatagtgcacagaaaatagcagatggcctcatgtaaaaaaatctgtggaacgccgaaatgaaaatggacaagaaaatagatgtagagcacaagataaagaaaaggaggaagagatctcaatgtagatccaaaaacatatcgctaagatcatttcttcatatgatgactagcatgctgaaagcccgaaaccaatgatgttaccgacggcccgagtcagagctgtgaggaacatgactctcaaacaggtcctcaaggtatgcgctaggagcacgaccctgcggcgcttgattgaggttcaaggaactcgtcgaggcacccacataagagtggcgctggttatgcgaatcatggtagacaccaacaggaggcagagagggcgacgataggccagcagtgggcgagtaaagaggctctccatttggagcggggttggagccaccggcagcggcgtagtatccagcaggcaggtatgttgagccacgattccccgtatttcctgtagcgtgcggatttgcatgcgatccagtagggccgcctgctgtaggtgaaaagaaaagaccgctgcttgtgctcgagacccggttgggcttgtagcttgcgcgagtggcggtgccgagtttatcgagagatacgtcggccaccggggcgacggggtagggggttgatcgcttctttctgctgccgcgcaggaggcgcttggattgcgaagcgtgccttactgcggcgcgccgcactgagcgatttacggaccatgcgaccattgcgcgccacgcgagcagagtgaggccgatcagccctagcgcggcgccgacggcgatgaacactgtgccttctggagcactgctctctttcatatatggggcattggctatgggtggtatcgtcacaacagcgccggttgtggtggaggaggatgttgatgatttcgttgtcgtggagacggatgatgtagttgtactgctgtcggacgtcgtggaggaggaagaggaggatgtggtggttgtatccatggttgtacttgtcgaagaagaggacgtcgtactggtggtagaacttgacgtcgattgagaagtggttgaagaagtggttgtctcactcacgctagaagtgctttgagtggtcgaagggtcgtcggtggtcttagcggcatcagtatttgttgttgtatcgtccgctggtacggcagacacttgagcagcgatgacaatgaccagaaatagtagcagtagggatgacggcctggctgttccaagcctttgcggtagaactcgcatggcagcgtaaacaatcgatcagctgctccacaatgtgcgggtcagtaggcgccgatcccaacgacagcgaggaacaaagcagattattatcaatttaaatcagcgcatcaatgaaatccgtttggcaaatttaagatcgctgctggttccaacaatgactgcggtctctcgtgaaatattggtagatgcaggtcaggtcacggatcaacaatcaacgaatttccatatggggtgaggcgttgggaaactctcataaacgaatgactgttgttcaagtgaggccaagcagttccccgaaaatgactacaagaagagacctttctaaccgaaaagacgccaacgctaaaggagaggggtgccttaggcaaccctgagattgtcacctgacagtcaaaaaaagatacaaggacttgcgcatttacgttggcaaatctaacattcgaaaaactgggaggatatgagatatcatacatgggaatacaaggtaattgtccctgaacccccgataaaaaaaaaggaaatcaattgcagcaatgggtggaatccaaaaatataacccaacaaagcgctacaaatcactgcgctttcttttgcacagcagccgaggtgtccttctcaaatgcggcatagggaatctcgaggctgcttagagcaccgatgccaatatacaaaattgcgaggaacaggaaggtagccatgagtcccatgaagatgcctggagaagggtgagcatagtgaatagatagaaggtgggattgatagatacatacctggggtgaagtattgatattcttcgaagagagaggtggaattggccgactggctcgaggcgctgccttgcgcggagtagtcccgcttgagctccatgtggagggtgtcttggtacgaatctccagagatgtcgtagatgacggaatccgtctcggggaactccctcggtgaggtaatgtagagaatagtatacttagacgaggaaggaattcgatcggcgacatcggcaaggaaaccatctagcagagttagtgagaaacaagtgcataggcggactgcatacataccaaatccagaaagctgctgtgcgcggtcggaacctaacgatagcatggggaattcgacatcaataattcggggacccttctcgaagtatgaggggtacgatccagcttcacattgttagctctgacgtccttcgcgggttttgccaagttccgtcgttggccatcaaagcaacttacaggaagcgtcaacggcggtagtctgggccttacacttctcctccagaatgcttttgacatcattgggttgaaccaggccagcgacctcgttgatgctcatcttggaccggatcgagctgtctttcccgagcatcttcgcacctaagcggggtgccgactttcgcgtcgagaagtcggaactgtgcacaccaggctggtagacgacgacatagtaatctgacggacaggtactgagagatgaggaaaggttctcgaggagtgaagttcctgtctggatgtaggcggaattcgtcaagaccctaagggaggaccgattagttaaccgcagcgcgagagattcaatcaagcatactcagaagttgaggcgaggaagaatggcgaagtatctctgaaagcattcacggcagcagccccaagggccaatagcccgaaactgctgagatacattgtgtttggcgtggggatgggtcaagttggcgatgatgttgccaacgggaggtgtccgacttggcctcggaggcggtcgagaaccccgacccgcctgagctttccatatcaacttttttttttttggcttttgacgcagtttcaacacaacctacgatatacaaaggtctactctcgattcgatccaaatatacttgagattgggattttcattcaccatgggtcccaaggatttgaaaaagcgcaaaattgttgctgggccgaaagttgaagaggtcaatttcgacgacgaatcccgccatgaatacttgactgggtttcacaaacgcaaagtgcaacgggccaaacatgcgcaagacaatgccgccaagagatacaaagaggagaaaagagaagcaagaaaaaaggttcgataggcttcaatttgtgcccaaagacacccactaatttttctagattcgagaggatcgcaaaagagacttcgaacaggcaatggcggagcataaagcagtactcaagcgcatgaaagaagatgctggagatctcggcgcaatggaaggcgagaaagaggaggaagattgggagggaattgaagagcctccagcagtggactacgaagccgaatacgtcgacgaggacaaatacacaacagtcacggttgaagaaatggatgcatcccgtgagggtctgcttaaggctgccaggggggaggactcagaaaatgaagaagagaaaaaatatccggtcgagtcgacagaggatgacacaaaggccaagaagagaaagccccggagtgcagcctcagaagcagccaggaaaaagaagaggaatttccgctacgagaccaaggttgagcgcaagcaaacaatgttaaagcaaagggctgtgaaagcgaagagagcaaaggcgcgaaagggggcagaggaataagggaaccacatcttgaaagagatacgacatcacatgtgcatatactcggcttcaagcaattattcattagtcaattttacagatcataggcgtttgacatcatgggagatacaaggaagatgcaggaaatggtagacaccgcagtgcacgttgcatgataaaaaaaggtattgctatcaaaagcgctgtatccggtccatacacttgggaccagtgtaacacaaacagtcacagcatgaaaaagcagatgacaaaccagagaatgaagcttgtatccaaccatatgtttcccgatatcctgcacctatcaccggttcgagccagcttagatatcggccatctgggatgcaaggtcgtcaagctccttcttcacagtgctgtgttccttgatcgcatcctcgtatctttgctcgagcttggcgtgttggtcctcgagcgcctgcaccttccgctcgtagtgaccagccttgatatccgtttggcggagcctaagtgcccaatatgtcagtatgtaactgtgaaagaaccggcggctgatcgtacttctcattggtttcccgcagagtcttgtcgttctcctcggcctcctcctcaagaagctgcacccgtcgctgaagggcctcgttctgagtgtcgtgctggaggctctggctggcagcatccttagcctccttgagggcggcctctgtcttctcaacctcctcctctagaagctggttgcggtggttcagggatgtgatctcttgttcttttgacaaattctcctgttccaaggtcttgaccttggccttgagctcatcgacgagctcgtgagcctcatccgcctcagcgcgaagggcgaccatgcgctaaaataaataccgacacattagtaaaatattcagtggagaagtgatggaatgctggggtggtatgcatatatgcataggaggaggggctgtgtgattttgggaggcagtcaagctaccccgccggcaggggaaatgacttacctccttgatcttgtccattttaacggtattgaaagggagtaaggaagataatatgtatggttgaaaagaagagtagtttggctttcgctcagcgagaaaccgggcgagtgttggatgggtgtggaagatgatatggggagagttttgggagagaaggggaggaataaaggctgagcagggaacaagtagacagtactagcccaacacgtacgagctccactacaggggaagtaccggatacttactgtgtaccaacggcgtacccgtggtatggttaggtacacaatccgctctggctcgcagccaatcaccgcccaaggatcgacgcgtctccacgggcaaccacttgacaacacttccagggctgcatctagaactgtgctggctcttgattacactcaacacacttacgacacgacttggatttctttgatacggtgcatgagaaccaacagcttcagttggccaccatgttggctcttcgcgaccaggaaaacctggtaaatacccaccagaccgccgcggctgctaagcccttgaaccaaagcaagccgctggcacccaagacacccggcaaggcacgaaatgacgagaacaacccactggcatttggaaaccgcacggtgaagggcaatgggaaccgccaggataatgggaaaccgggcaacaacgcgttcatgactccaatgggtacgcgtgctgcgcgaaaatgacagatttgcaggtgacgttggataatgactgacttgtcttctcgcgtatagtgagggaccgagctcctctgggcatgaaaacgaccaatctcaaagccaacaacctccaaacccctgcgccctttgggggaaccaagcaaccgaggacaaaccgcagacagtcgactgcccagaagatcagaaaagctgccccagtgacacagcaggcccaagccaaagtccacatcgatgctgctgcagatgatgtaccggatattgagtacatgccgccgaagcctagaggtacgctaagcacaactagagctgcaacccaaaagcttatttctgacgagctatagatcttccggaccttccagacgatgtgacatatgacactacattcccccaattccaaccgaagaatcgagctctaggtttggagagtgtttacggaaagcaacaagtcggcagcgatggactcacggcgaaacaacgcaaattccaggaggattctgcggcgtgcgataggatggtgaatgacatgatcatgaaacaactcgacgacattggttttgagagctctggtgagaacgagtcgacaaagacacttgagccaaatgctatcccctcaaaaagacctacaaccaccacacgacacactcgcaatgtgtcgacgctccgagctcgtgatgctgtcgctgcgcttggcggatcccggccaactgttgcacctcgagtggccccaatcccaaagccacgggtggcatcgttggcatcgtcgctggttatgcccaagaggcatgccagagtcccgtctaacccatcttccatgcgcaatactgctgccgttgtcaactctcgtacgaccgttggctattccaaaggacgcaatgtgtcgtctaccctgcgtgataatcattcccaaacgcagaagccctcgagctcgcaggtcctgtctcccgaaacttatatgcaactgtatggcccccctccgctggactcggaaatgtggactcgttgcaatgctgctggatgtttcgatgccccggacgagatcacccaggaaccggaagaaccattgcccacgtttgacgaagatgatgaggcccagagcttccagctcactctgtaggggtacattgcgaaagatacttgacatcgacagggggattacaattttacttcagtatggttatgatttggcatgtggagatcgacattggctcatatggtgtaggggtttggcggcaagccgaaggatgccggcgttatggaatagtattaatgtacttgtaactggacaggttgcagcccttcaaccgcagaccaaattgtttcaggcgttctccactctcatgatgatcctttgccaagaggtagacaggcgagggtcgcacaccaaaacttgattaagtgtgaatcctcaatcactgttaatcgctgttgtgttcacacaatttttatgaatcggagaaacacactacccactagctacacggaccccataaatctctgcgacaatatttcacgtaccttagtggaattagtggaaaaaatagagcccaatggacgggagagtaaagtaaactcggtgtacctcgcgggtaccaggtccccagccaggccgcccgggtaacggcaagtaccaatcatgtacttccaggtacataccttgatctagcccacaccgccccggaattgcccataacttcttatttactctctggcctctccttttcctctcccattcctctcaattgacgcttcgccgccatgacgaccattcatccggactccaccgaggagttcgaatacatccagactccggctgcccccgcgcagaccaagcctgccttcgattgcggtgtcccgactaccctggtaagtgcattcctagagctatccgtgaccgatgtttggtgattccagggcctaatttgcttcatttccattcagtacccgactattaagaatgccccagttcctgccgactctcccggcagcgacagcttctccaatggcttgatgatcgctctggagatcatcgtgccctggtggctggctcgccaggttggtggaggtttctataccaccatcttctttgctctcttcacctcagttcccgtcctggtggcattctgggctgtctcttcctccgtttctcctcgcaagaccgagaaggccaagtactgtggccgccccgtcgagcactacctgcagttccacagcgagcacgatcgtgctacctaccacggcaagagcaagattcccatggaggtcttttatgagaagtacttcaatggtgaggttgacttcaagggcgatgctctggagtgcctcgagtaccgtcatgactgggccaacttcaagttcactactggtcttttcaagcatttcctgtttggtttcatccccgagatgctgatgcacactcgttctcagggtaagcgactcttcatgcagctctggtggcaattctaacattgtgtagatgaggagcaggtccgtgatcactacgacagaggtgacgacttctacgcttggttcctcggcccacgcatgatctacacctccggtgtgatcagcgatatcaacagggaggagaccctcgaggagctccaggacaacaagctggccattgtttgcgagaagattggtcttaagcccggtgaccgggtccttgatcttggctgcggctggggaacccttgctaaatacgcctcgacccactacggcgctcacgttaccggtatcactcttggccgtaatcaaaccgcgtggggtaacaatggtcttcgcaaggctggtatcgaagaggaccagagccgcattgtgtgcagtgactaccgcgacgctcctcgtattgagggtggatatcaacacatcacttgtctcgagatggccgagcacgtcggtgtccgccacttctccactttcttgtctcaggtttacgacatgctcgacgacaatggtactttcttcctgcagattgctggtctccgcaagtcctggcaatacgaggacctgatctggggtcttttcatgaacaaatacatcttccccggtgccgatgccagtactcctctcggttttgttgtcgaccacctcgagggcgctggctttgaagtcaaggctgttgacaccattggtgtgcactactctgctaccctctggcgctggtaccggaactggatgggcaaccgcgacaaggtcgaggccaagtacggaaagcgctggttccgcgtaagtttctctcaggattctcccagtggatctttctgaggtccatgcactttcttactaataatatctctaattagatctgggagtacttccttgcttcctccactatcacttcccgccagggtggtgccacctgctggcagcttacccttgttaagaacatcaactctacccaccgtattgagggtatcgctactcagttcggtcttgctggagctcgccagagcgccatcgaccgcgctggctcccttcccaaggcccacattgtcaagaaggacctttgaaggattgatgtacaatcatagccatcatctacttctccgagggtacatatcagtccccctcagactagtatgacgttacgtgaggcgcggcaatatgctgatgtgttctactgtgaacatattcaaacttataaccaagcatgtatgacatgagtgacatgacgcgaggtgaggtgaagctaggtgaaattgaattgcgtgagtggtcgtggaagaaaaaaggcaggagctggtagcgaaagaagcatggatagtcagaggtctatctggctggtccgcctggatatctacttcgatatttatctgtggtcgtgcgtctatttcttatgcctcaccctgtctaaggggaatatttgtacgaagtcaacgagtctgtctttgtcatgttattttttaagaagtcaatgactatttctttggaccgatacttgcagcatatcccttcgcttcttcgcttcgaatcagtaagattgctccactgagcccatttcacaggtgaccagttagagtttgtactaaggccatggagctcgcaagataatgcaacagaattctagggcgtcaactttctgctggcatcaaactctaattgtatcgtctaaaaaagtcgtgatatgtgtctataaaccgaattcgagtcttcaatcattaggttcgtcaatcaccaaaactttcataacaccaattagatttctcgacagctaagcgtcgagaagcaaaggaaaagaaacaaaagaccaggattgcgatccaataggataaatggtatatgtaaagagggaaacaaaggcaggatagatgcagacgtcagacccggttgaccctaggtaagtattggtacagtgaagagtaaacagaaatccagggaaatagaaattcatgcttgtcgcaggcccagagatccaatccaaggagtctaagaaagcatcgtgcatgaggttacacacatctagttgattgacctccaaaagaaaacaataggcgtacaagggcatgtggtgaggtgttccacacacgccgggtggaaaaaaagaaaaagaaaacaagagccaagctcagttctcatctaccgctgctctagcattggattgggtatatccggggttttggttagggcaaaagaagcccgaagactcgaccgttgtgttgggttgagagggagagtttttctgtgtcgcattctcgttccaaatcgcttgagatactgatcaaagacgaaaggtttaggtaaatttagtccgcgtcgaatttatggttgtattctccgagaaggacgtcatctgggcccgggccatgggtatttcgaactagtgcacagaagcgtgagtggaattgtccgaaaaccaggatagtggtgcatgggtcacacggctgggatcagggggagtgcggatgcacaggggggaacatactccattcagcttccgtccggaagaacacccacatccaacgtcgtacaacttcgaggaacatgagtatccataatccgctttcagtctccgaaatccagccgaggcctgggacaatgcgccatagccatgagaaacgaagcgccagatccgcgataatgacgtagtggtacatcttgtcagatccgaagtaacgatgccggcggagtccatatggatggctgctgtcgcgagattccgaggaaaatagagtcatatcccaatccttgacgacatcccaccagaaagagtagccggagttgataaaagagacgagaaacctgggggtattagagaaggcatagacacaacacatgagggatacaatcttacagaaggcgcatcatgctaacctcgctatatccacgtagctccaatggattgtagttgcgcattttggaggctatccaaatgaccgggaacgcacttgcatacttgagagcgttggccaagtgctggtttaacttgtgcgtctctctccgggtgactgtccgccgcgcacgataatattcagtcaaacactgacgaagacgaatcaagctaggaacagcgaggatgatcggaacgacgatttcacttccacaggcccggttgggcttggaagtagcggcgaagccatcggtgaagaacatgcagaagctgatatacagatctccgatcacgcgagcatagctagtgagggcatctgccagcagaatgtcaccaaacttgccatccttcgactcggccagaccgccaatactgatccgcttgagggtaaggagaaaacggattcgaccggagcgggaggcgcggttgaaaggccagatcagaataaggaggagaacgatgtacaccgactgcgggagccagtccagtcgctcaaccaattcaggggctcggcgagtgactacccaaaagacgatgaaccacagagcaagtgggatagtaaaacatgtggccaggcggtagacggcgatgtgatgtgggcgttgcgaggaggatgtgcgggcaggatatttgatgagcgccgggacgtcctggaagtatgggaatctgatcagccgtcgggaatacgctggctaggtgaggggcgtcactcacgatgttggcttttgccaagtattgaaggttgagtccccatccccagaaacctagctccttgtgttagcacactcgggaccgaacccgatcggacaggaatgtcacctaccagcgaccaagatagcagctatacgtagcggtaaagggaagatcagcccaaaggcatccaattgagcatgttgatcaactgccattattccattgatcaggggggggggaggcggggggagatcgcaggaggaataaagggttggagcagcaacaaagaccccttggatatgtaaccaaaaaggaatgactagaggtgagtcgacgtctttgaaagtccggaagttgagacttttccagtttgaagccgctcagggcagtttaataggcggagaggaggagaatacgcgcctggactagtcacagtccgcggatggtctggaaccccacagcgtcaaattgggtatataaaattagaactcattcgaagcacatcgggaggaagagcctgaagcgggcgatttttacgggatgtaactactgccagaataccaacgtatccatgtcatcatcggatcaaagggaagaggccaaagccatggacttgcgattcaaggcccctggatttcttcaggaaaaggggtaccgaggagagttaccaaatcaggtacattcagccactcgaaagcctcccgcattcgtctgccacaacgtccaacctttcagggccctgggaggttctggcggtggggaccaatgacgcttgcggcgtatggtcaccgtgttacggtaagttacgggtatttttgaaattatgtcattgaggtcatggggcagtcaagagggcacgtgacactgatctaaccataacgggaagtcagctgatgtcactctataccgaggcatcacatccgagggcaactccggggaaattgtgatctccaccaggtacgaacgtcggggaattgagcctgggactcgtcttggtagctataccaaccctctataacccgtcatggccgacgacgactcccatctctctctatcaaccccgaactcagccctcggctcctctacctctcacttctaccctttcgcaacctcaccagacatcatccgctcgcatgagaaggattcattccttacgggcagtctaattcaacaatctcaagggatcgttcgtgctctccgcggcgcccgatacgcccacacccactccgacgccatcaaacacctcacagaactcctctacttctccctaacaaccgccatcggcaaccgcaccctaggcgaagaatactgcgacctcgtacagctagaagatgacacacttcaattgccgtcaattggccgtcgcgtggggtacttcttaagcagcattctagtaccgtggacactgcagcggctactacctgcattgcgacagaggatccgcaacaagctcgagcgcaacattgcacgccaacagtcacgagcggcgcagcaggctggcctgctcaacaagccccagttctcaaccaccccgactaaacggccgttgtttacgaaactgcgcatccagcagtatgtccttgaacacctggactccatcacatccttgtcgcccatttatgcgctgagtattgccaccttctatttcacaggctcgtactaccacatctccaagcggatttggagccttcgttacgttttcacgaaaaagatcgacgacaatgagcagcgcatcggatatgaggttctgggtgtgttgcttgttctccaaatcgccgtgcagggattcctgcacgcccgcaaactcgccgcgagcatgaatgaagatgagagcgagtctacagacgctggtcagtctccctcgcagggtggagctgttctcgcttcgattcagaacccgtcctctattcctctccttcctgcgtctgtgcctctgtatgatctcgaggaggatcctggcgctgtctcatggattcccgagggtcagcagcggaagtgcaccctgtgtctggaaatgttcaaggaccctagtgttacaacctgtggacatgtcttttgctggatttgtgttcgggactgggttcgtgaaaagcccgagtgcccgctctgtcggcaagaggtcttgctatctaaggtgcttcctctaagagggtagctatgtggttagcaataagttataggctagtgctctcattatcatgactatcgctgaagagattagcgcagtcgatacatgtgtatacacttttttggacaaatatataccccctgtttctatttaatccgagcatggtttttatggactgtatggttcgattgaatcttgacatagatcacccaacatgcatttctacaacgtacatatagatcgagggcaggacacaaagcaccataacaaagggacgaaataaagaaagaaaaatgcctctctagatcgaaactgcacaaacatataatcttttaaaactttggcaaaataaaagagtgggatattgaagggataaataaatctaggtacatgtactcagtatgcatatatacatggtcaaatcagtgggtcctcttcgccgttgaccgctagtccaagtggaagaacaatgggttggttgagttcagcgaatgcgggacgaggtggcattgggtccatggcttgtcttttcgcttccatgatatggaacagacgaacgcaggcgtacggatcggtagcagcatctaaagaagaaaacaagattagcatccaaggagagagattgtgcaaatcgaagtactcacattgaacttgacgataactcaaattccgagtccaatcaccgcagcgcacatcgtcacttttctcgagagggagaccgaaatgctcgtttacttgctcgctgagattgacgcctctcttgttcaccaacttaggattgtctttgccgtatttgatcaacttgtacaaatgactgagctcgaaggtggctttggcatcaatgccgagatacttgcgcagccgtgtgcagtctgccttgatcgaaacacccactttaatgacgtcgggagattcaacgaggcgtctcaatgacggagaaactaggtcctccagagaacgtgcaggcttgaagagtgcaacctgaaagatggcgatacgttcctcgtttgctatttggatcaccgagacattgctctgaatgctgtcgaagcctgaggcttgagccttccattccatgtcgaatccaatgactttgctcccgaggaagtgttgcacggcttcttcggtgctttgaagggtccggcaataatgcacgatgagttttcggccatcggggctttgttgtgaattatgggtccagaactggggcgtcgtaagattgctggcactggaaccaatgtctgaagatggaattggctcagccgtggaatcattttgttcagcagatcctgatccgttcgtgggatcccggaccgaggacaaatgggtttcaagtggccgttcaaccagggaagtatcactggcaccactgctttgtcgaagctgtgcttggtggaaaattgcacccgtgctatactttctcccatcgtttggttctggtttagcgaatgttttcttcggaaacatcattggtcgtagtctgttacgtgtccttgtgcctgggaagtgagtgctggtttctcttggacctggcggacggaggtcatcaagacgtggctccgtgctgaggctcacgtctttactcttcggaggcataggccgtggcttgggaagaactcggctagaagccgcattgaccaggaacgggttggactcatgcgcgtcgaggctcctaaagtttctcttccgggatttgggtgatgacttgtaaatgacctgactgtcctggccgtcctgaccgtcctgatcggtaggcgcattgactaggaacggattgaactcatgcgcgtcgagactcctaaattttctcttccggggtttaggtgatgacttgtagatgacctgaccgtcctgaccggtaggcgcatcaattggcagtggtttgtattcaagatcatcctctgttgtttggccctcagtctttattgtcgacagatcaggaggcactccgtgttcaaggcggctctccccttgactgccttggtcagcagctgactcggctgcaccctcttgttcgattcccctcctcacctgcgttctccatttcaaggaactttccttgggtatcacaactggaccggacgtttgattgccctgattcgtaggcggagactcgatatggctcaacgatggccctttgatatatctttcgagacggctttgagataattcgatgaaagcggccttggcagattcggattcctctcgttccctacgtctggcctccattgtggaagaacctagctctaatatttgggagtttacgccaatgttgcgctcaatctcgtcgtggatgagctcccactccggccgcgttagtcggctggccatcaagggaatataagccccacaagcgagctggcccatgcgatcggtccatttcttgaaggcacgggtatcctgactcagtgggttgagcacttgaaactttccagcaagatagacacgttgtttcattgagcgtagcaatgattccgatcgaagacgcagccagtttagatgtatgtattcagacaccatctgtcgaagagcgctgcgatgtttctggaattctatacaccagtcggctatttttgaaacagtggaaaaccgagtctgcccagagaccctagtccacaattccccactatcacctctcaggctgtggtaaaggtaccaaacttcattttgaattccccatgtgacaacttcagtcatgagcagtggcgctattacatccaattgtcgccagtagatatgtagcttagggctgcgtggcggttttggcctccaaagctggttgtattcgaggtagatcttgttggatatcaggagtggactttcgtctaagtaccgagcctccggggagtccttcggggcacccagcgcaagtgcaagcaagacccgcctgtcagtagcttcaggagaacgtgcggacgaaactgccgtcatgaaatccctcaaattccatagttcactgtgtcgaagtggatgcgaagccatctgcctcctgagccaatatgcacggtggtgatgcgcacatttactaatttcgagataactatgctcaaggatttctttgtactggccaaacacccatttatcggttgcgcgaaggttcgagcgtgcttgaagggacgagcaaaggtccctgataggaaaaattcgtgtgttatcgctcttcagtcgtaactccacgtagttcttctgaatcagattgctttgatgaagaattctatcaatttgttttcttgcggtattccggggtcgtaggaaatccttgtcgagataatttttcaatcgatggatggacagctcggaaaggtgaaccagaggtgcaaggagtgtcttttgagacgtttgaagacacttctgccaactatggatcttctgggcggacattgccagttcgctttcccattctggagttctaccaaaaacaatacagcagaaaccatgatcaatcattcgacccgtcttctctgcttccgcgacagcagcctgtagtcgttccaatcccattatggaagatgaaagctctatcacttcggcgacatatttttgagtgatcttttctgcttgcagaactaaattcgtgttgtctgagaccatccttacaattctcgcggtgatggtacttgacaggctttccagttcagtcgcacattcttgggtggtcttttcagcatggagaacctgtttcgttatccgtgagaccacatcattgattcgattttgaaatgttgattcgagagctccatattcagcctcataggctagtatggccttgatagattcatcaagaagatcatcggcacgtttgtacttcagctggatataactcccaaccaattcctgataagaaggcagcgaattaagctccttctcaatgtgcagacgttgagagactcgggatttcccctctgctctcgatcggatcaagctgcctaagtctcgatgttggacagggcgcacaaaagcagaccggcctggaattcgttgtaccggttttgatacgggctttggctctggaacttcatcatcgtcatcccatatgccttctttgcgagtggtattgcagaagttccgcttggattgagaggccgtgggcggggcgtacgaggagcttgtattcggtaaagacacatgtcggagcctcgggacagatcgagcgcaagcactgtagtttagtcagaaaaatagccatcaaagctgaaaaggaaataaagtgtgcttactgctgacgctcgaaaagtcctaatcgcagtgacccataggatctggatccatcgatgtgactgctatgttttgcaatcgaagactgggtcttccgacttgctaaaagattcggccgcattggcataatgtgtgacaagcatagtggaccagcctggagccccacaaagcaattgaataaagtcgaattgattgacaaccagtggtaactcaaacgaaagtgcggctagaaaatcgagtgagggtcaggatatgtagtacttcatgttgcgcaaatcaactttcagagtttcctctaaaccatatttggattagtctctcgggtcggattatcaaaggtgccgagcgacaaacgatcacgtccttttctatatcgatcttgcccacgcggaatgctcgatcacctttgttttaaatcaagacgctttctaagaaaataattacgagcacattcattttctgtctcccaacatcatggcttctcagctacttccccttggtccgtgcctaatgacccaagaaagccatgaccccgctaactgatctgatagagctcattgataagtgtgttggctcccggatttgggttgtcatgaagggtgacaaaggtcagctaaaaatttaatggttgagcacgaaactgttctaatgcttatgaagagttctccggcactttgctcggattcgacgactacgtcagtgagtatccctgcataagaagtgacgatctcaccaggcactaatttcgatttagacatggttatggaagatgtgacagagttgtaagtggcttggcttttcgatttttagattcaagctacccttttcccttctgtggctgtgctgccttggctcctacgtctctgcgcagtgcgatttgcaaatttccgcgaaattctcgacaggtcattctgatgattgtgctctggactaacctcctctcagcgactacaccggtgctcaaatcaagctccctaagctcttgttgaatgggaacaatatctgcatggtaggttaaattcacccgaaggccatctggatgctatactaactcttccaccagttgattcccggtggtgaaggccccgcggcaagctcatgagctcgagatacccagtttttgccgtgacgaaaataaaactttgtgtattaatgataccgaatccaacgagatagaacaaagtcgttgaatgaatgaagctccatttcaagcgtgattttatctcaccccagtagcatgtggctcagtattgaagtaagacaggaataagctgttgtcaacaccaagagaatgtgttcttcgcctaaaagcatattcgttattatggctagtcacagcctaggcgtcttccggcgagagggtccagctgcaacctccaatgatatacgaaagcaagtatggagtatgcaggaactactctgtagcccacaaaagacctcgggacagtcagcggtagtcagcggcagccggcagccggcggtctaagataagctcgccaatcagaagtcgtctctacccgagaccagggtatcgacggctaacctcgggcgccgcgcgctccggctattaacaatattggaagcatctcatcgatacgagtaaaggccgtttgccgcgtgctgatcggacaattctttggtggatatcatggtggatgtagagacgcaattgttttgactactccacatttaacgtgttcgatggctatgttgtagtcagttgactgctgttaagtggaaattaatgatggagaaccttaacgagcaggtgattaggatgtgatcatttagagtacattattcaatgaataatatatattatagacctgcctattcggtagatccagacatgttgtagactggccgaatagtagtgccatgccgtagagctcactttcgagagtcagctctgactcacgataatacacgccgtacgtgatgtgatctttcaatggccaatctaaagtaaataagctgccaggaccttggaaaagtggcacttggccagggacaggaaaaggggtcgcggtgcacacgggatgtcagggggctgcaggtgcagtatcagccgtctgcggataatcatggatattcgttgagtattcaccttcaataccccaaattctatcattctgaagatctcggtgctgtttcattgtgctgtctttccccagactccaaagttgactagtcaacaagttatgtggaaactgttacctaacagattgtcatccccgcattttatatgcacctaatgttgacttcgtatttacgacaaggcctgtttattctggtcatgttcaacatgacggtttttgagctgggtctaaactattggataccgagcgcctcatggacttgaatgggaacttccgacttggctgtcgggaaatatgaagatgccgagaaggaatattagaacaaatgtatggagtacaatattggatgtatattgtgtctttgtccattccgtggcggtggcgaaaatcccaatgcgcattgcgtgctgtttggcccgggctggacttatttatggggaatttcgtcggcttgaataacctcaagtgtgaaatgttcggagtactccgaggataatatagacattttgcggggtattacccgtgacttctgttgctcaaccttggaacttgacgaacagccttagaaaggtccacgcgtggccaggtgtgtctaagggggagtgtagatttaaccgattccacatgagcacctacctatgtaggcaatgttgtaccataacccgggcgcagccgctgacctttcaacagtcagacttggctctatcatctatgttgtagtcaccggaacacaaataactagtcatcaatcctgcccgatgctactgtggctgtcttgttgcgggagcgtggccagtaaaatcagctactgcgcgccatcagctcggaaaggcttgggtggctgatagtcaagcatagactcaatccagctcaggccgaagacggtgcgcctttttctcgcccccccttatggtctgaccgcgttgcatggaccaaaccttggaagtcgtaaaattccctatctcagaaaatggtgatgcgcttgacccgcaatgcggacatgcaagataagactggtgggcccgtttacacatttcaatttggccacaatgagcttctctcgagtttacagtcacacgattgtgaacaccttgagatcttgcgttagccatgattaatgattaatgtgattaatgtttcctggacggacatgtccgaatccagcggatgggccacaaaagtctattggcggacctagggcatcctgatcaaggtgttgtgaaaattggccagtgataatacgagggtcttgctgaacacgccgacaccaggccaatcattaagtctatgttgtataatgaacctcctagcacacactcttggctttttgggaggcttctcccgtgcttccatgcatatcacaaaccgccacagccacgtaaaaaccttcgcgtcgaaaacgccgacgcatagagtttgcctacagggtctcgtggcgccatccctcatccccaccagagctcatgccagtctctagtagcgaacccgaccgaggcggtttcaaatgtccgcaatcaatcgtctgcctttctgcgcacatacaacacacacacacaggccaagaggctataccgaggcgacgggcaggaaaactcaattgaggcaagtttgcgaacaagcctcagtggggcgaattcctcgtccatatggcattgcacgcatatccctgtagcccatagcgcatgccacaggaacggggtccgtcgggaagccttcccataggcaagggatgaacgacgagaggaattcccctgccgtccactggtcagcacagtagtgtgagtatgtttcttcccaagtaaggttatctcgttccaaacttagaatgtcggttctgcgagataaaggtcttctagaaggacgagaagcggaaaccttggaactcgcggacactatggaggactcgttccaaggttcaaaggttgccccggtggaggtccgggggaaagggatgtgcccaggtgtgctcttatctcccgaggtttctctgattgggcaacgatcgactatcgtccacgggtagagtgcggagagactgacagatggggcttagtggatctggggagttgcctctttcgggctccagaagcttggcttttccctgtccacctacagaatattaaccagatgaagtcgttcaagggttgttagtatgactgcatggattcagtagtcatgtactacgagtcaggtcatggcgatagtcaagctagggaggtgtagatattagacatccatgaggtagatcctcccgtcccgttatgacagtctaaatcacgcgagagatagataagtagtggcgctaccggggttccacctgcaataattactatttcgcttttaccttttttacctttttgctctaaaacaataagatagtcgggtgaaacactaggtatggagcttccacctcaggatcaagcgggcttatcttaggaacttgaacttgaccgtttgcagccttgcaagggtatctcactgcatatgtatgaatcatgatcaggatcgtgtgtaactcatagcctcgcagaacactgagtaaggagtacaaatgcatcataaatcttaattaaaaagataaattgcctagtcgcggactcgggacccagagcatgccaaggttatcagaagattaaatgctgttagtgcggaactctagatggtctaagcgcatgaaagcagatagatttaggtgcttttgatttaatttgattcgatttgattatatggaacgtaaaaataattccatcgcttttatctgaaatcggactggttgtatttataccctcccccccctcccaaacggccaaccctctacttgtttcacctctgtgtcggttcattgaccttaactcccacagaaccttcggcttcagcgaacagatacttatttctgtcctgaaaaatacccactccagaagagaaaaatttcacattctcaccatggatgagaagaagtttgaggagcacaccgtccagactggatcggatgctcccccatcctatggcgactcatctccaacgcgaggaggcatgggccaacgaatcattgacagcttcaagagagaccccaaccacactgtcctcggtactcctggagctgatggcactgccatggatgtcgaggctgccgccgcccataacactgcccactcaccactgcagcgacacttgaagggtcgtcatctgcagatgattgccatcggtggttctatcggtatgttctgcgctgattcgtctccatcctattcggtctcgctaattacatttactatgtaggtactggtcttttcgttggttccggatctgttttggccgtcggtggtccagcctcagtactgatcgcttatattttgatcggatgcatgctttactgtacagttcacgccttgggcgaaatggctgttcttttccccgttgccggttctttcgcccactattcgactcgtttcatggatcctgcttggggtttcgctatgggctggaattacgctcttcagtggctcattgtcctacccttggagattgtcgctgcttccatcacagtcgattattggagcccaggtgtttcaaacgctgcctgggtaaccatcttctgggttgtgattgtctcaatcaacatgttcggtgtacgaggatatggtgaagccgaattcgtcttctccatcatcaaggtcgttgccgtgcttggtttcatgtaagctacattgctgtttggcgaaacttgaacgtctaactgacttgactattagtatcctaggaatcatcctcaactgcggtggtggacccgaaggtggatacattggtgccaggtactggtacgacccaggtgcattcaggaacggtttcaagggtctctgcagtgtcttcgtcaatgctgctttcgccttcgctggaaccgaacttgttggtcttgccgccgccgagaccgccaatcctcgcaagtccctcccgactgccgttaagcaggtcttctggcgtattgctctcttctacgtggtttcccttaccctcgtcggccttctggtgagatacgacgacccgaaactgatcagcggttcctcctccgccgacgccaaggcctctcctttcgtcattgccattgagaacgcaggaatcaaggctctgccttccatcatgaacgttgtgatcatgattgcggtcctctctgtcggtaactcctccgtttacggttcctcgcgtactcttgctgcccttgccgagcaaggccaagcccccaagttcctcgcctacatcgaccgcaagggtcgtcctctacctgccattattattgcgtctgccttgggtctgctctgctacctcgccgcctccgatgtgcagacgactgccttcgaatggatgatggccatctcgggtctgtcatctatcttcacctggggttccatctgtgcttcccacatcctcttccgtcgcgcgtggaagaaacagggccacaccttggatgagcttgcattccgttcccagcccggtgtcattggctcgtgggtcggtcttaccttcaacattctcgtgctgattgcccagttctgggttggtttcgcccccattggttacggagaaatgacatctcaggagattgcctacaatttcttctccgtctacttggccgctcccgtggttctggtttcttacgtcggttacaagatctattacaggtgcaagtttgtgaaatccttagaggtggatttggacaccggtcgtcgcgatcttgatgtccagcatttggttgagcaggaattggccgagcaaaaagaatggcccaagtggaagaaggtttacaagttcttctgttaagcggatgttttatcttttttttctttcgacatccccccttatgtactacatctttacgataccataattgcgctatgaatatcatacgaaacgttcatacattccaaagggcataccctatttttaacaatttccaagacactactccgtactccatagcacgtactataatctcgagcctccaggcttggcatatctgtggggaagcgtttagactcagtagtcaagtcaggcatctgggcataacaaggctgacaacataggggtagggtagttatacatagtactattgcactccagggctatacatctgtattttctaatacattttgattgaatgtatagttattattagcctacccggctcacagccacaatgcaaagtcaatgcgcaattcaattgtaaacaaaaaatagacaagacactcctccccctcccccttttttttctctcagcatgaaaaaaacagccaaatttaaagatttgcagcaaattaccaccccggcgtaattttcaacccaaaaatagcccaaagtggatgcaaagacggtggggagaggtcgggttgtcagccaaaaggacgcttgttaggcggtaatggtctgagatgtacgcaaatccccgtaatattacgagccacatgtgacgccctacgatctggaaatccatgaactccatcaaactccatctctatctccatcttcatcgttcccattcggtctttctttgtttttgttgccagcttcctgacgacttgcatcgcaattcgcttggcctggctttcgctcattttagcttcgaattcatccgcgatatcggcgcctaacaccctgcgcactctattctcacgcattccaaagcgatcgtctctgcttcgtcattggtgtttcggtctatgcgcagctccgtcccgtgtcaagactggacattgaattcaaaaccaagtcaactggtcctccctcggtgaccttgatcatatcgcaaactcagagcctcatcgactccgattgactctccgtttcgcgcttactccgcccttttacgattcgcgttttcctccgaacatacgaactcatcgctgtcagctgccgggtcgctttcccttcttacgccgatcataacgtgtctccgcctgacggtctgaatcagccttttagccgtccgtcataatgcctggtttcgcggactctttctggacccccgactatgcttcgggcttgggggtgctatacgggaagctgcagcagggagttgtggaaaacaaacaaattttggccattgcatccatgcgttcagatgcagaagagcagtatggactccgcatgggagacattgccccgagcgtggataagatgacggcgctgggattcggcaaggacgatggtgccagtgtcagaaaggtttgtttcagacgcatagagaccggagtgaagaaagactgacgtcgcgcgatcctcgttacaggcatacgaaggaatccgtaccgaaatggtcgaggcctccaagaaccaccagaagatcgccaacaatatccgcgaattggtcgtgtcgcccttccggcgttggagcgaccaacacgaaatgcgtgttcagtattcgcatgacgcgctccagggccgcatcaaggaacacaccaagcaggccgaactggtaaggaaactgcgcagcacttacttcaacaagtgtcgtgtggttgaggacctggaagaagagaacaaacttgctttccaagatcccgagacgagtcccaagatcaaggtgcccccgaagatcgttctccctgccgaggaagagcccgacgaagaccccatcgagttgggtgagcggatattcccaccagaccacatcaaaaaacttctcacccatatgcttgataacatcaagcttggcgaggcgaaggttcccattatcggcacttatcagaatgtatccacgggcgcggatattgcgcaatatattcaaacctacatggaggctgagaatctcactcaagtggagataattggtcaggatatggtagacaacggtcttctccgcttggttggaaatatgggcaatgtctttgccaatagctccaagatgaactaccagtggcgccccaaggttttccaactcaccggtatcccagaaaaaaagaagcctctcatgcgtgtcacctcagtggcgtcaagcgaggacggcaacggcagcgactcacctattgcatctgtctccgagatgctgtctggctggaatcccctcaacaacccttacccgaacgagacaccttcggagaagctccgaagggaggctttggaagctgatgaacggtacaaggttgccgttcgtaagcttgaccagatccgctgccggctggaggaagaagtcattggccagctcaaatacatggaacagtgcgagctagaccgtctcaaggccatcaaagccgtggttcttgacttctcgggtgcgatcagcaatgtcattcccaacctgcagagcacagtggatcatatgatgctataccaggaaacaatccagcccctaggcgacttgagatacctgctagagaactaccgcacaggtggattcgtacctaagatccaagcatacgagaactactatggttccgttgaaggtatagccttggtcattgcccagagatgaaaagttactaattttaacaccaccagaacaaaactttggtgtcgaccttgaagctagagcccgtgctgaccgcaaacgtgttccaatcctggtgaccaccattctgacctatctcgataaccgtaaggaattcatgacatacattcagattctggaccacgctcacaaatcttgcaggctaccctgaacttgaaggcgatgaagcacgacgaatgatctggttgaccgaagttgatttgggcacgacgcacaagcttcgtcaaattttgaacaacagcaaagccgattatgccgaggtgttgcctcaattcggaattccagttattgcaagcgttctaagattgtaccttcttgaattgccaggttcgttgctctcttggtggcttgatatatccttatgctaatccccggatagactcattggtttcctcgcaagtttacgagatcgtgaaaacgatttattcgaccactgctcatgagaccacggaagaagggcggatcaaggttctccaaagtacccttgggcaactccgccttgtcaatatcgctacgcttgatgccattatgactcatttcacgcgcctgattgatttgacctcggccgacgaagaatacatcactttgttggcacaggccttttctccttgcattctccgccctcgcatagagagcagtctcactatgaacgagcgccacagctaccgtctgatccgtgatctgtttgctcacaaggactccatatttggcgaactgaaacgccaatcgagtgcgctcggaatgaccagttcctcctccaaccgtccacgggccatcagcacggacgagagtaatcgtcgtgcggcgacggaggcccgccagcgagctattgtcaaccgcagccgggcaaccagtcctgtcaatcgccaacggcatcgacgtgaccgctcgagtggtgcttccgagataggtcggttcccgatcaacgtcagtagcccttcagatcgcagatctacccgcggcagtcttgatgtaccgcccaacaaggctctccaggccgaacctgaggatgctcctaccgtgaacacccaagttgccgagactattaccaacggcacctataccgagtctccttcttcagctgttgccagcagcagcacccactcgagctccccaagccctcctcctgttcctttcgaggacacagcctccgatgactccccaactcctactcctactccggctgcaacatccgccgagtttgagaagcgcaattcgatgtcccgctcttctgtcgctcgatccagccgcaagccaggccttggtagcttgtccagcttccccactggctcggctgtcggggccagggggnnnnnnnnnnnnnnnnnnnnnnnnnnnnnnnnnnnnnnnnnnnnnnnnnnnnnnnnnnnnnnnnnnnnnnnnnnnnnnnnnnnnnnnnnnnnnnnnnnnnnnnnnnnnnnnnnncggggcgcggctgtcggggccagtggcacagagagcaatcgaagcagcattgccgaaagtgaacccaaccgagtcactctggaggacaagcctatggacgactagttctgaggatctgtggatgcggaggaaaccttgtacagatcagactgggagcagtatatcgtgctgggaggaaacatgcgttattgcatcacattccacccacatctttgttgctccctgatcatggcggagacgacttggcgagtgacaatttggaacgttacctttatcttttcttgtcttttgtttctccttttgaacttgaacttttactgcatgcctcttaagcatgcatgcatacataccctgtcccttctgctatgttaccgcagaagggattgttcatctcccttttaccttgcctatgttactgctgctgtgtttttgccccttatgtttcctgatgcattcccttttttgccctcgtggtgttatccacttggtgtatgtatacctcctttttcgtgcatatgaatttctttctgtcctatatatagtactactctaacggtgtagttctgtagaatttacatggaattcaatagctaaaaagcgttttcatcttctaatctctttatgcctgaaattactgtctccactaaagtctggtctggattcggggcaagaaccaccgagctttagctctcattgacttggattttaacattctcccgaaatattactttagtctatgaacgtcttgaaaacaaccccagaatcagacagcaaaagtactttgtacgaataaccagccccgcatatcttccaagcatctacaacttgacttccacgataggatattccaagccaagcgcaacaagagaaagaacacaaaacaaaacaccgaaacacaaaacaaccccaagccatgctaccaaatagccaaatcccaatcgtggactcccacatccacctcttcccagaaacgcacctaaagaccctatcctggcacaataccaacaacccactcggcacacaacacagcgtaaacgaatatcgacacgcagtaacacaagccaacgccacacccgccctccgaggcttcatattcctagaaacagaccgactatcctccatcaccgactcaaccaagccacccaacaacggctggcaacacgccctggatgaagtctccctcctaacccgcatagccctcggcacaccaatcccaggcgagggccacgtcccgcacgacaaaacgctctgtctggggattgtgccgtgggcgcctgtgcccggcggaccggatgtgctgagcgcgtacatggagcaggtccgccgccgcactggggaggaggtttgggggaaggttaggggagttcggtatttggtgcaggataaggctgaggggatgatgctggagaacgggtttgttgctgggttgaggtggttggggagggaagggtttgtttttgatcttggggttgatgctaggtctggtgggttgggacagttgagggaggcggttgagatgatggggttggtttatggggggttggaggggggggatggggnnnnnnnnnnnnnnnnnnnnnnnnnnnnnnnnnnnnnnnnnnnnnnnnnnnnnnnnnnnnnnnnnnnnnnnnnnnnnnnnnnnnnnnnnnnnnnnnnnnnnnnnnnnnnnnnnnnnnnnnnnnnnnnnnnnnnnnnnnnnnnnnnnnnnnnnnnnnnnnnnnnnnnnnnnnnnnnnnnnnnnnnnnnnnnnnnnnnnnnnnnnnnnnnnnnnnnnnnnnnnnnttggggggtgggaggggggtgatggggttacgattgttattagtaggtttctttttctcggttgggattcttcttgctgactgctatagaccatttgtgcaagcctaaccttcgtttggagtcggatgatattcgctctcatccggagttccttgagtggaaggatcttgtgactgagatggcgagggcgagttctaggacttatatgaagctttctggggctttttcggagcttctaccgctacaggcggagtcagaaccggatttcgaggcaattgttgaacgtgtgcagccgtggacggatgttatttttgacgctttcggggccgatcgtgttatgtttggatcggattggccggtgtgcaatattggcggtggtgggaatgatgtctcttggggtcgatggagacgtgtggtggaaaaggtcttggaacggcgaggattatcgggggaacaaaagagaggtgtatggggatctgttgctttgcatgcctatggtatagagatctaggtataaaatatgaaatgcaaagccatttgctcggacttccaagaaaaataaacaactatatatatcctcattgcaggttaacaaataacccaccatcaaccagtagctgcgcaccagtcacatagccactcaattcctcacaagccaagaaaacagcgggcccagccaaatcccgtggttgacccagtctgcccagcggaattcgaccttccatataactccgcttaacagggtccttcacatcctcctcattaagctgcgtccggatagtccccggcagcagcgcattacaccgaatgccgtacttaccgagcgcacacgcacatgactgcataagactcaacacgccggccttggtgggggtgtaatgtgtctgctgggcaccgccgaccagagcggagatggagctcacgccgatgatggacccgcccgatggtgactgggccagtgccatttggcgggctgcagcttgggtggcgtagaatgcgccagagaggttcgtggagagtgtgtggttcaagagggaaggttcgagtctagcggggtcgttagagaggagaagaagagtgaattgtaaatcgataaatctcactctaggaattcagcgaaccgacacacgcctgcattgctcacgaatacatctagccgaccgaatgcctcgacggtttttgcgacaaagttctggcctgtctctggctgcgaaatgtcgccggataccgtgaggaagcgggtcttggctgcttcggcttcgatctcgttcacgtctttgcgtagtgcttctagcagcgcgtcttcttttgcgccgccgaggtggctgatggagactttggctccgtgacggatgtaatcaagagcgattgcctgtaattgagttagtgtgtttttcttgttttcctgaatccaaatgagaaatcatacccgtccgatgcctgtgaggccaccagtgatggcggcgactttgccaactagtaattgtgggaaagtcattgaagatgttgagaatggacattgatcattcacaactctcccaattctcccattctcacttgggccgaatacgtgatttctcgagctcgggatttcgtggtgatgttaccccgagtgtggggaaaccccgcagtgtatccggctacgaagtacatttcctctttccagtagaataatgactagctagcaagtgtcgaaagcattatcgacccttggcccttggaagcttccttgttacgatttatacaggaagatttggagttttgacatgaaacgaaagagttcaactcggctcgttctcgcttgtgtatcgcaacgcgaaaaacacagaaaatcctgtacaatataatgataataagtataggaagggacatgagatgggatttcaaggatcctaaactccgatgtgtatgtacatggctctcgtatagtgtgtaagtaacttataaacatgaaatatatcacaaagaaaagaagcgaagaaacccctcaaaccatcaatattacgtagagccattggccaactcctcgttgtcgggtgcgcgtagggacttctgaggcgctggcgtaaggatagcggcagcagggatcaggggagcagcaggattgagctccagaccaaacccgggcttgtccaagatcgagacgtcaagatatcccttagtaggaatgggctcgttcaagaaaaggttaccaaacacaggctcgacagtgtggccatcggcagagttggcaaggtactcctggaaggggctattggactgggagacgacaaagtggtacgagtagggaccagatgcgtggggcacaacaggaagatcgtaagcagcagccatggcagcgaccttcagcagctcggtcattccaccaacccacatcacatcgggctggaggatgtcaacgttgcggccctcaatcagcttgcggaagccgtagcgggagtactcgtgctcgccggtggtaaacttgacagtggggtgggcacgcttgagaagcgcgtggccgtcgaagtcatcgggtgaaagacactcctcccaccagtcaatatcgagtccaatagcctcgcagcgcttgactagctggattgtgtaggggacgttcaaggacatgtagcagtccacgcggagtgggaagtcggcaccaactttctcgcgctgctgacgcaggtattcaacgttcttcaaaaggccctcagtaccctcgtcaggaccgtgtggcaatgccaccttggcgccgatgaacccggcagcctttgcggagccaggttggggaccggtgcagtaaaagtccagtcgggttcgagtagcacccccaatcagcttgtagacgggctctttgcggatcttgccctgcaaatcccacagagccaggtcaatgaccgagatcacggcgacgggcagacccttgcggccgtagaacatcgaggcgcggtacatcttctcaaagaggtcgttggtgtcgcgggggtctattagaaatatagttcgtcagaaagatccattgttatatgtatgtgagatggtgtacatacccgcgccaaccaggaagcggttaaaatgttgctgggtcagccagcatgcaggcgggcctccgaaaccagttgcaaagcccttggttccatcagtggcctcaatctccacacagaaagatcctaaaacattgattccccatgatgttcgcgaaccacggaattgtgcccacttgctcataggggtagcgatattgctgtcgaccagccagtggcctcccttgacctgtattgatagttagaatgttaaatttcaaaacaattgacatctcagagctcgtacattgtggtaatcaccgccagagccaacaccatcaatgatgaaggtgcggacttccttaatgcggggaaattccgttgttgaacccatgacgtatgaaatgaacaagtctaacgaaagaacccaataattgtttagacgaaaagataaagaaagaaaagcagagatccaacaattgcgggggggttcacgtctatttcaacgaattccagaagccgaggccagctcggggcattgctaacccgagagacggacaaacggcgactcggacaattttgtgacaacacatgtttggttgatttatgtcaggctatgtggagtggataaaaatgctcttgaggtcctacttcttgaagttcccgtctaaccattgtgtcaacgacagaaaacagcttgatctccgagccttgcgtccttcaaagcccgtatggctcttcaaaatcattgtaagaatctggagatctagaaatatgtcgctgcggccgctattggtaggtagttgacctgagtgccataggcctcacgggatgatctaaatcattcaagggcgtagttttaagacgtcgttgtaacagactgtaggtccttaagcagtctactcggagctggcggatttctaaagtagtatgctgacaatattggtagtaagtgtcatgaagagatagtagctgtcgatattcaattggatgaaattcgcttgatatgtacgtagcgagggtataggattcggagccacttttatgttgtatgtctgtataatgcccggttaagctaatgaataagatcgaaggcaaaagtaccaacgcccatttagatacagagctcacgggttgttttaagcaatagctatatggtaaactagtgactatggtagtaagacttgcaactctccttgactagggatttcggttgaactctttacgcactccccttttccagtataaaaaatgggaagatacggttacaaataagatcagctattatttactagatcctattcaaatatcaaagagatataagtcgaagactcgagccaagaggacaccaaaagcggagaatgcggggtgccccggtttctgcctgaggccttggctccacgagccgaccatttcggtttctttccctttccctcgggttggatgctaactatcgtggagaacattgcaaggctcccttgattttaaaatataccaagatattcgagtctattccagtctattcggacagcttgccgtgaatcggtcttgcatcatgctcggtccctgatagggcgaattgttatctcgctaaatcaaaatgccgaacactgcgtttcccgcacaggagacactgtcctccaatcagcaactcggtgacccatcccgagatcagagtgcagagtattcttcggattctgataatgatcatgttgaactcaatggctctacaagagccttgaagcgaaaacgccccctcactgtctcgtgcgtacctggcggctcgttcgtatggaacgtaaccccgactaaccctacctagatgtgaactgtgcaagcagcgaaaggttaaatgcggtatggtgtaaaaacatcctaaacggatattttgtttctaacatcgacaaacctagaccgagtacaaccgagctgtggctggtgtacccgaaatggccagctatgtgaatatagggaacgaaagaagccggggctgagagctggctatggaaaggagttagagcaacggcttggtaagttgctgtacagtctgctcgtcatctgtctcatgtctcactcgtacctcagatcgattggaaggtattatccaatcgcaagctcggcttatcgagatgcatattctgcaaagccagccttcaatgggtcacgaattagcccatgcagggcatctctcatatagcccttcatccgaaccgtcggcagtccacggacccagtcctagtactgctctttacttcaacgaccctgggtctgctgctactatactctcacgccgtgcggatgtctctatcaatagtccatcggatggctctgtgaggaatacctcacataataatctgcaacacgacttgtcaacggcaccagttggccagttggtacataacgaaaacgcacatcacgattattcaggaaacgaatcgtccctgaaggtccccgtcaatgtatactcaaatcaagagcaatctcttactgatcctgatctagatctgccaccatatgatttgctctatgctttggtagatctctatttcgaacatatcaattcctggtgcccaatcctccaccgacgaacaactctggataccttttttggcccatcgccactagaggaggcagaccgaatggtgctgtatgcaattgtggcaacaactctgcgtttttcctctgataacaggctaaatgaccagaacagaaagcgctatcatgactcgtccaaacaaaaggtcgtcctgtatggcctggaaaattcttccgtcagggcacttcaggcactcgtgattctagctcttgatttggttgggtcttctaatggcccaccgggttggaagctccttgccttgatcacccgatctgtagttcacctagggttggcggtggaatcaaagtcttctcttatcaaccccctctatccctcaatctatactctgagagctgtcactctttcggagccagaatcttggattgaagatgagagtagacgtcgtttattctggatggtctacctactagatcgatattccaccctggcgactgcgttcaatttcgccttggatgacagagatatcgaccgcaaacttccttgcaaggacgattattttatgaagaaccagccagttgagacgcggtggttccaatgctccagcgaccgtgtagactatctcagtaaagctgaaaacgttgggtctttcggtctctatatcgaaatcttaggtatcctctcgcggattcacctgtttttgaaacggcccgtcgatatcggagctctgtcggatgtcgcggaatggcaggctacctatcgcaaactcgacagtgacctcacatcgtgggagttcaatctcccagcggaatatgcttacgaaagttcgtcccgactcttcagtgggcccaagaatggccgggctctgcataacgattgggtgcaattacatgcaacctaccaaacgtgagtgggtcacatctttatcgttttgttctaataaattaatgaagcaattaatctagagccgtgattcgtctgcactcctcagcagcatacccgacaacccgatctccaatcttcacgccctcatatagtgccagccagcgatgccttctagccgtcgaaaacattctatcggtgacaagattcgttgtagagcacaacatgctagacaagatgggcccgcctttcgccttcactctctgggtctcagcacgcctactcctcgtccacggctcaaccattgcgcataccgtcagccccgacatcatgtttttcgtggataccctatttcagctaggaagatactggagagtcgccgagcgatacagcagcatccttcagcgcgtcctggacgagtacaacgagtatcagcaatccatcgccatagacggagaacgatccacaccatcaacagtcaagattctcgccgatatgcgtcgctgtgcattcgacctggactttttgatctcgcggcagccacgtgaatcacccgccgacaatggcatcggtgagagccaccagcccgggccaccactcctgacaatgcccgcacgaaacttcgcccccaacgaactcgagtacctcgacgtttttggtttctttaatgttcctcgtgttcctcctgcacgacctcctgacttatctacttctgcctcttctcatttggaaatcccagggtctgtaccaaatccgatgtcgattcatgggttgacagacgctggccccgcacctccgactgggtcagtagatgatgctggccatcactctaatgtgaacgaattcaacatcaccaactacttgattccgacgccggagacagattggctgtttcggccatcctagaggtagtgcgccattttcagtcgcttcttgcctagaggaccgaccaaaatcttcctccacatttttccactctttgctcttaagcactatgttgtatactacccaggttatactaggaatacccttaccaatatgccttccatgtgatcacagacccatttaaagtggcccacttaaaataaccttattctaaagagactttagcacaaccttggaacacactacggtgtccgcgggtagttatacaagccaaagcgagaaccgaaagcaaagatgatagttccattagaagtgttaactcctacaaataacataacatacatgaaagaagaagagaccaagacctcaagaaacaaagaaaggcaatgggatgagtgaaagcatgcaaagtccagggcctacaaacttcatcgagaacactcatttttactcaaacaaatttcaaacgtgtctatgacacgtcggtacgggcttgcatccgggcgaggacctcttcgaggaacacgtcgagaacagtatcaacaccaccgcccatgtcaacaggtctttccatatcccagtgttggaggctgttgaaagctcgggcaatgtcttcggccaccttttccagaccatggtggattcggacactgcggtcgaagtccttctcttcttctggggtagccgggggttcgttaggattgcgtccgggttcgagacggacgagattgttgcgacgccgatccatggctgcgcggagggccggaagaatcacagttccacaggcggtcggtcgctcggtctcagggggaggtcgggtggaacgcttgtggtcgctagaggtaggagtgggaggggtggagcgatggggcatagcacggtcatccatgtttgctggtgcgcgcttcgacttgagtccggaaactggttttgcgtgttgcagtggctctgtatgtcttggaagagcgacttgagggatacgtggagactgtggctggtgtcccacagaatcagcaacagcgcgagaaagtggagctggcgtgtgcaaaatttgaccagatgcgatgcgattttggtcgtgggggggaattctggagaattgcttaacaggagtgccctggttactgaccgcggagctaggtttggctgaagaagcagtatccaatttgccggcggagtgagtagctgcctgtgcgtattgttcgtttaatcctctcgtgggaagattgtctactgcaggtttgctggccactggagacacgaccttgcgtggaggaagtgcggtctgtgaggagcgttgcttgagaggggaagatggagcagagggaggaagtggggttttggtgggagaaacattgaaagcagggtttgctggggacacttgagcgtgtgattggggttgggatgttccggcttgtcggggtgtctcttcgcacagatcccactcttctgtctcagttcgcgtattggtgccagagcgcgacgggggtgcagatgtttttcccacaggacgaacggtcccaaaatcccaaaggtcttccttttcttgggttctggcttttgcggtttggtcggcttctctatcatcatactcatcatattcgtcctcgtcgtcttgaccccgatgagttatttgccaacgttctgcccgctcaatgagttccgtcaggtaggttgttcttttggcgcgcttcacaaacggatgctcaagaagctccttggccgatggtcgctccttagggtctcggcgcaagcacaattcaacaaattgcttgaacggcttactaaaatcgcctaccaatgtggggggcgggttcttgggaatcaagaacagcactttcatcgggtgaatgtcggcgtacggaggatcaccgcaggccagttcaattgccgtgatacccagggaccaaatatcggccttgtaatcgtatccagattgcttgatgacttcgggagccatccaaaatggtgtacctacaaaggtattcttcttagtcattgttgccgacagttgtcccgacacgccaaagtccgccaatttaacttgaccactcgcgctgagaagaacgttggcagctgcaatcagaagtgttagtcgtcgcacgtcgccatttcgagcaattgaggtcttcgtacctttgatatctcggtgtagcttctggtcactgtggagatagtccagcccgcgcagaagctccctcagaataatggcaatgtactcctcgtggataacaccaggtcgcagtagaccgtggcaactaccaccagcgcagaactccatgatgatccacaggttagaccctttcaagtatgagccgtgatacttggtgacatatggtgacttcagctcggacaagatggcaatctccttgatgatatcgtcgacatcatcctcggcattttcaacgtcaatgatcttgatagcgactgattctccagtgcgtctatccaaactaattgtccgaattgggtcagctgtttgttgaaccaatatgtggatatagaaggccgacttaccctttgaacaccttaccgaagcttccaccgcctgtaaaatcacgaggctgttagcaaacatatgaatccaacgacccttgaaggctcaagaattgaaaaacgtaccgatgcaagcttgcttggtgtaaatggtttccggatcaattggaggcggcattttggcgatttatcccagtcaccggaggatgacgatggacatgaattatgcttgaagctatcgaggctaatgatggaatgtcagattcacaaccggcagtcgcctatcacaaggatggagtgtggggttgagccgtacgtgacggtgcttgaaaatggactcggatggctgtctggggtgaaagaatgtcgctatccgatcaatctgaatcgattagataagatctatgcaatatctttccaggtcgcaagattctaggactgcacgggagagaaggaagagaagagaagacgttgttcgtttgggtgctaacaattgataagatgtcaactggtaaacaaagacaatttttcaataggagcaggtgcggcgaggggggtgatcgtaagattccaaaccgtttgtggcatagtcttcacgttgcgattagctcgtctcactccccgggcttctcagggatatctatgtcgtgagctgcccttgcttgtttatcgacgcggggggcttattttgccgctgcttatctgggggcggtgtatctatggcgttccaagtccagttacaacatttgaatattgtgcaatcatctgagacttgggtttcaggcttggagggcatcaaattattaatcggactcgattttgagacttgcgatgaaaacccacctatgtgttcacttttccccagaagttccaccattccaacttctaattcatccccacaaacgggaattcggatgggggcatatcgggacccgaatatctagtataagagtgaattgcataaattagaggtgctttacagacacaaaggcgaactatgtgaagctagctatgttctggggttgtatagctcagaggtttctatgttatacaacgtatgaatatagtatgatggattatatagatcgaaagacttcagcatgtaagaatcctcgtctttcatcccaatatcatctggtttgaaaggagtgattaaactatgtaaactagggcacaggaagcacccgtgacacaatccaaacagttccttattaggaacatcaaacctgtaggtttgactgcatttctcataggctaggctcattctatgaccgtaactatataaaagtacgtcccatgtcttccaagcgaaatgttccttgatccttaagtctgtcaagttggtactgtgtttattatcatgattcattgaatgctttccaggcaagcttggatactacgtatactctcacatcaaggtctcaaggttggcaacaacttgagagcccggtagattgaatgatatcccgaggaattacaaaaccaagcttgaaaacaaaggtgagatcccacgggatccaattcatttccatcaacgccgtgcataaaccaggatgataaaaccgaaagttcaagaaagcaagaggattactcttccagatatccaatcattaccgtgccattcttcaggcccgcatctgcaatgctcgtggtaagttgatcgatgagattgtgccccatgctattcaggtcaaactcgacaccagccttgtctgccaagggaggatcagccttaagccattcataaattctctgaacgggatccgacaatgaaaagcgccgaatgactctgccagaggggtgtcgaaactgaatgcgtgtagttgtggccgggtccgcagcaggttcagtgtgtggttggtcgctgggaatggacgcgaatggggaggcctccgcagctgggtctggttcatccatggtgacatcttcgtcgctggtagcccggcccttgcccttaacagtgtctgtactgcgtgtcaaatcatcagggtcttcgagtgtttgaccagcttctgctgcacccccaagactgttcctcattgccatttccatcatctcctcctcggtcatagcatcaatgctcttgtctttcttgtcggatttgcgcttagcgacaggattgcgcacattgtgattcaagctgtagcgatcgaggaattcgtgaagttgcatgagaaagtccgcaggcttgaccaaaggcggtccagaccagactttcatttgttcaccagttcgagggtcgacaatagcaatgtgggggtaattgtcggagacgtcgcttccctggaagtaatattggaggtaggaagacgcacgggggtcatctttcgagtactgcaggaaaatgaaatgttccttgacagtatcttgcactccagagtccttccacaaatcgcgattcagaacctgacagtcaaagacggatgcgtcctggatattgacaagcagccatttctcggtgtccttcccctcctcgcgcgccacatcccaaggcagtcgggacatgatctcaaagggagggcggtacatttcggcgagcatattggatttggacgatacctccgatgcgcccccagttacggcagcgagttgttcgcgacgagattcatcatcgcccgtccatatggaagatgactcttgctggttgaagattccggcccgacctaaaataaagtgttagtataagttattggaaaatttgaaaacacagatagcacccacctgatcttccacgagctcgtagttggctgagaatattggcgtgcatgtcttcgccactgtcataatccgccccgggccccaccaaagtctctgttgtccgcgccaacggcgctctcacctcatcgtcattatctaggccacctgggccaccatacatttgctcttgtaggcgtcgagccatagcctcatcgtcatcgagtgttggcagaccggattgttggggagtctcatcatcagtgtccgagtcaatattcaccacgtcggcatcatctgggataccagaccgatgagaaggttgagcaggttcaccagtcaagggtgcgcctccactttcaaagtaaagctgcatggcctgctcgatttggaactcagttatctgcaggtactgtatagccagctccggcgtggagccggtaatttcagtgaactgagctaccacgtcgttctccatggtaggcagtgtgctgaatgaggttccttgataaagatcttaatttgagagaagaaagtgagaaagaattgacaatggatacccactgaaagcttaggcgtagaatgaaatggggtaaagactcggagggtgatatgtggggagcgagatttggtgcaaaccgctgcaaaccagaagatcactaggtcccacaaaagaggttgtcaggaattaaaaaaaagagagatagaaaagaaatagaacgtccagcttcacgactgaaagaattcggtcatctcgaatctaaacgcacatgagaggataattgacacctgaggtggccagtgacgcggctgactaagtcttggagaaattgcacctgtggctgctacactgggccgtagctctacgcgcgacgcgtccagcgcgttgaccaggtggtggagctgccaattacacttcctaactgggctctgggaccttctttcctgacattcctcttttagctcccacggaaactacgtctattgttcctaccccgtcgtttttatagtccaagtcatggcaggaacagttctaggaaagcgcactcgtggtgtcgcggacccaggtaagatcgaccatcccaccttcctctgctccttatcttcaagccctaacccgtcttctagcattgccggtgcgaaccgccagcaagcgccgaacagttgctcctcgagctcaccaacaagataccgttccaacctcattacgacgaacaaggtcaactgtaaagaaagctgtcgaacaacctgaccaagaaaatggcgagagcaagacagcgtcggagaatgtttcttctaaacataccttgcgcgatgaccagttcaaatctccggtcaagatcaattcgcatttcaccgtctcgaaaccggtggaaggtaagttcgaaatttttgggtgttgcgcctgaggcaccgctgatcggacatgcagaagaaattacgaaacctatcgagttcgagttcaagacaccttcgaaatcgcgattccgagatgatttaccgcagtctcccgtcacccctagacatcgagtacaggtcggagcaaaggcagtaacaccgcgcaccccccgccatgccgatctccccccgacccctaggcagagtgccactccaaaaattgtgaactcggtgtattcgcaagctaggcaattgttcgcccgaggctctaactcgggtcgcttagtgggacgtgatgcggagcgggaaaagttgatatcttttatcacagaaggagtgaactctcggaaaggagggtgtctctatattagcggtccgccaggaaccggaaagagtgccatggtccaggaagtgtgtggagatctcgatctttctaaagtcaaagtctcgcatgtgaattgcgcaagcatgcgaatctctcgcgatgtctacagtagactcatccaggatttctgcgaggactcggatatgttcaagaagagcgaaggcgatcgcctcaaatctacgttcattccatccaagaaagggcaagatatgttcctggtcactttggacgaaattgaccatctgctcaatggtgattcaggggttttgcagtcgcttttcgagtggtcattgcaaagcaagtccaagctgatgctgatcggcatcgctaacgcccttgatttgaccgaccgatctctcccacagttaaaggcaaagaacctgaagccccgtttgctgccgttcttgccgtacagtgctgcatctatcgcaaacgtcatgaccaatcgtcttcgctcattactccctgctggggcagagtctgacccaaagcttgtcccctttgttcaaccagccgccatccaactttgctccaagaaagtagcctcacagacaggggatctccgcaaggcctttgagttgatcaagcgagcaatcgacgtcattgaacaggaaacattacaaaagttggacaagcaagctaaggagtccgagaatgtttcgatactaggagagaacaccaatttgtcatctcctgccaaagttggcggtgctccgaagccaacttccatgtcaagctacacagtcatcacggcaccccgagccagcatcgcccacattgcccgaatcacatccgcagctttcggtcaaggcactgttcagagactgcaaagtttaaacctgcaacaaaaagccgctatctgctctctgattgcgcttgaacgcaaacgccgccagttcgaggttccgagcacgccgtccaagtcgcgtacatcggcacccactatcaagcaagcatttgatacatattgtgcgctgtgccgcaatgacaacattttacaccccttgactgccaccgagttcaaagacgttctcagcaacttggaaacaatgggcttggttggagaataccagggtcgcggtcgaggtggaactgttgcaggtggcacggatctgcgtcgcacaccctcaaaatctggccatgctccttcgactcctcataaggcccttgacgagcaagctcttgtctgctttgtttcccagcaggaaatcgagagccagatcgttggacctggcgaaggaatccttcggcgtcttctacgcggcgagggactatgattcccttccctatttcttaagcgcatccatacagcatggcgaactttcatttttcatttcccattccctataactgcatagtcggggtcccatgcgagggcatttttatcatgtataacatgcttggagtttcattttggagttggaaatatccttgtctcatcatctttagcgtctttcaatcacggctttccttgttgtcaactctcctttgtctttgctcttgttcaaagtgaatcatgagatctctacacaaaaccagataaaaacacaaatgacttgatcaatggaattgaaactaaagagttttcgtagccctaatcgatattgtctcacggatcgacatgagtaagtcccaggttagtcggccactaggcatgtgatgctggttggttgggcatgactttttgccagactccacgagtcatattattgtcttatataccatctctatcgagctaagtagaagatattttgttctaatcgaaaccatatgagggctttcatgtaaaaagcccatgcatgtaattttatatagcacctgtataagatttatatttctaggaaataagaacaaaagaaatgaatccctgtcctctctagtatattctagagacaatctgatggtgtgtgtcattcatcatgcagacaaacaacgaatcaaacaataaaaagtacgccacctcgcatgaagacattacgtatataaactattcagcttggtttttgttctttctgttctcacaagatatcctgctatcagagacatcgggccctttgcgaataaccttcagcctacttaccaaatcatggcggaaatccaagcacaggtagaagcctctgctctcctgcctgatagccagcccaacgaccctcagccgaccaaggaccccgcagaagactgtaccgagaagggcagatctgttgtaccctacttgttagaaaatagtccagagttccgagaactcagtgatttgagacagaaggctagtcacaccgaactctgatattatacgtatatgattctcatacgttgttaacagggatgggaatcctccgaaggcgatcagtactttgcgaaacttcgtcgaaatgccgataaatccgacaaaaaatcggctacctacttttataagtttatgagagtaatcggacgcgaaattgacaaggccaccaatgccttcaaagcccaacgggttgattcaacctcacctgccattctcgacatgtgcatggcccccggtgcattcctcgaagttgccttgaaaaagaacccgggctcacacgctctggctttcagcttgcctgtctccagtggaggctataaaagtgtcctggcaagcgacttggatgccaagcgggtatttctcgatgtgacaatgcttgctgcggatatggatatggatctgatccccgagggccatgaagatgagaaatttttgccccggcaacttgaggaagggatgcttttcgatttggtcatatgtgatggtcaggtcttgaggcaacatctacggcccccttttcgagaaacccgagaagcaacgagactgatcatcacgcaacttgctctgggtctccagcaccttagacttggtggtactatgatcgtccttcttcacagacttgaggcttggaacaccgtcaatctcatttggatgttcagaaagatctcgtgggttcggcttttcaagccaaagagcggtcacgccaaaagatcctctttttacatggtcgcaaccaacgttgacagccagaacccggaggccgttgaagcggtcaagcggtggaagagaatatggcggattgcaacgtttggctcggatgaagagtacggcaaggtgaacttgtacgaagacacatcggtagaaaccttgctcaaggactttgggccggaacttgtgaagttgggaaagacaatttggaagacacaggcaaatgcgttggctaaagcaccattcatggggaagcagaaaccagagtgatcaatagaaggagaagggtgaccgagatgttattgatatcactcatcacaacgattgacttgaattgattgtttctactagcccactagctctcagtgtaaagacagactatgtagctctagacttgaatcaaacaagaagatcatgaaatccagataggtaactagacgaacctaatcctaccctcaagcaagatagagcatttgaatatcagagcgtcacaaatcccacgctgccaggaggattttgttacattttgatccacgggtgtcttgtgcttaagcaatcctgtgcacctggacaggcgatgtcgactcacaggttgatatggcaggagcatatgccttctaaactttcccatctttcttgtcgagcacaagagcttcaccttttgacatcttcacccttcgacctaatcatcaccatgactgcctcgattctgatcctcgttttctgcgtactctttgtgcccggttcaataattgttgcctcatagtaagtcattattagccatcttattacgcttccttcgcggactatgctgagacctcccaaagcatcctaattagcccgcttcaagcaacgacagacacggctcctcccacagtcgtggacaaacattgcagagagcaggtgattctgtatctgcttgagaattctccgtagataatcaacactttcggatggctggggatacggttctacctcgtgtggcgtcttgtcaagttttgcgtggacgatcttgtgaaaccccttgttatgtcacttgccacaactgcctacaggtaacgttatttgattgtctaaatttgatctcgaacctgcaaagctaattaccggcatagagctttcaatcgattttggttccggaatgatggcccccaatgaggaaggaggcaggcgccggctactataacgcccactttgccaaagtctccctagctccaacattcagcagatcaaacgtattatgatgcatcgagttttctgtatctataatggataactgaggaatgcctgtatcttttgacaaggaagaaaggtaggaacctattttgtttctgtgatacagttccccgatattcctgcagacattatgtataaggcttcatgatatgagatctaaattgcctcacgatattatcaagcagcgaagaatatcaatgcaacatttcccccccaaattcctctcacctcactatctccccgtcaattacgacccccatacccccacgccctcttatcgataaaccccactacgtctccggtatataaatccgctgttgagacccctgttatccctaccaaacctatcaaaaatggattattctctacagaatcacgcttcctatatcggccgaccggtctccgaacttcccacccctgctcttgtcctgagtaagtcggtgctggagcggaacacccagatcttgttggatgatgtcaaacgattgggaattgagtttcggcctcatgtcaagaccctcaaggtacagcttctatgcagtattagcttttaggaaatgcactaattgcattggacctgcagtgcatcgaggtcacccgcatgatgcttggcaacggtacgcaccgtcggatcgtcgcatcgacgctagccgagatccggggggcgctgggtcttgtaaaggaaggcatcctagacgaggtgagtaacagtaactatttcaaaaccaaagtgtagcagctaaaccatgacagtgtctctacggtctacccatctcagccagcgccttgcccttcctcgagactataaccaagtctctgaagattattctgatggtcgacagcgagcagcaaatagatctgctagaatcctacgccgccaaatcgtcttctcccgtagcaccatggcccgtcttcattaagatcgacgttggctcccagcgcgcgggaatggtcacagactcaccatccctccccagattaatccagcgcatcgagtcatcgtcggcagcgaccgtttacggcttctactgccacgccggacactcctatgcatgccgcacagaggatgacgccgccgcagtgctccagaccgaagtcgaaggcgtagtggaagccgccaaggtgttggtagacgggaaatccgatagacggatcgtggtgtcggtggggtcaacaccgacagcacacgtggtgaaaagactccagggtgcattgcccgaggggatggagttagagttgcatgctggtatgtgatgcgtgacaactagctaggtgccatactactgcctgaaacagaatgactgacacggacgctaggaaactaccccaccaacgaccttcagcaagtagcgacctcgctcgtggaaccgacacagcaggcggtgcgcattctcgccgatgtctgcagcgtgtatcctgatcgcaacgaggcgctcatcaacgccgggaccatcgcgctctcgaaggagacgagcgagttccccgggtttgcggttgtcgttgatcggccccagtggagtgttgtgcggatggcacaggaacatggcattctggggtgggcggagtcggatcagacacgcaggcttgttgcgaagacggggtcgaagtctggtgatggggagaaggtggaagctgcgtttgcggttggggacaaggttttgttgtatatccagcatgcttgtatcacggctgctatgcattatgcttattatgttgttgatgatgaggatattgttagggagacgtgggttccgtggaaggggtggtgattgtcgtggtttttagagtgtcttttttcgtatatacttgattgagcatcaatagaatcatgtatcattattaatagaaggaaatatatccgtactctgacattttaatctgtactttatatctacaagatctaaaataatacatatcgcccagtttaattagaccacttgatatagtgatagtagagttggtgaatagcatttacattgatcggtacatttactcagattgaattgaacatcggatataccctgatcatgaaatgagcttggtgtgagatgccaggtcgttcgaagaaagagtacattaaacttgatcacgaagaggaagaaagaagaagaaagttgcaaagtgggaagcagcctgttgatatagcaaacctcgaatatctcgcttagctatatagcaaacaatctatgttgcacacatcagatagtcgacgaccagtagagtgatagaacagacaatcatgtaacacttggcaatatctggcacaaatccaataaattcaagcaccccaacgcttcttctgaaagtgatatgttgaaagtgttgaggacattcttgaatagacatggcagaggtagaaatagaacgaatagaagagaagagactgccaagatatatcagaaggaagactactaagtatgccaccgatacttcgtcatcgctcaccgccttcacgaactatgcatgttaacagatgctaaccctatatcaacttccatttatgtcttttgatgtcttttatactggctttttatctggtttttgtactacttgctatgtgggtttcaaatagaagatttattactagttcaacaccagaaatacctaccatgaagcacactactggtagagtattgctaatttaatttattgactttgaatatgatagacaagttgaagcaattttgtctctttacctataaccggatgactataattccgccaggcaatgatacttattcgcccgtggaactacaacacatcgaatatatccagagatataaaaaaggtgagattatgaagaaagatgtaaaggcattatgtacaggagaaaagtgaatgggtatcatgaaacttggctggaacaagacccggaaaatgtgtggcccaactgttgttgcgtggccgattttctttccgtcgctggtatcacgaggcccgtcgttgagatgggaccgaatgtgagaagtgaacaggatcaaatccatgaagacaaagaaagcaataaattatgatagaacgcaaggcgttgtaactgggaaatgttttgagttgatcgtggggatcgttaagtcgtaatgaagaatgataatcaagatagctgattaatcatgttcaaatttttgatattttattggttggaggactcaatcgagggggcccgagaaggggtgcgggatggaataggcgagggagcaggcgactcgccggtgacaaggtcgtcagtggtgaagcgcggcaaccggtcgtgcgtagagccgtgcgtggactgatcggaagaggcggtggaagagcgagtagaactgttgtccaatcgcaaggactctatgcgctccaggtcggcgtagtcaggaagtggagagccgttgtagtcttcaatgaagctgggggtaccatcgggcttggtgtaacaaggagggctggcgggaacgtcctcgtagattggaggcatttcctcgtcccagctaatgccaagaccaccacgctgtgtgacgtggaggtggaactgcatgcgaagcacgcgcgcggcaccggttggagtgattaggcgggtgttgccattagggcagaactcctcggccacgataagctcgatgacgaggttgtgcttaacttccagaccgccaggggcctccatatcgcagacggcattggcagccgggttgatgttggcatcgaactgcatggtgatctcaccaccagcggtgtcaaagtcggtcttccagccggtcttctcctcgttgtgtccgatgacgcgagtctcctggtgtagaacacctttgccttcaccgccgatcttgtgagcgtgcttggggcacgcagtggagacaatcttctgttgctcctcgatgcgccacatcatctttcgaagacgccagcgggtctgggtcttgtcgcccttgtcgaccacgccgctcaaggtcatctcgacggggaagtgtccgatagggtaaatgacggagggcagcacaatgcggccagtgaggttggttggaggaaagatgcggatagaggacttgtcgggcccgggaagcagagaacgactgatgtccagaggcagcttgaggttgtaatcctctccggtgacgctccgtgcatgtgccagcaggaagtattcgacctggcccagcacgccattgcacgaggcaggaaggtggccggggaatagatagctgaatgggaagtcgtggtccccgccatcaaggtgaaggtcctcggtgatgaaattccactgcgtcaactcttcggtgcgagtagcacagttggagcagtgattcgagacaggcttcttggtggttgtcttggagacgagacgtacatcaaactggctcaagatgactccaccggtcaactcagcgactgcaatgcgcaagcgtcccgagaacaatgcgccggtagagctggcaggtggaccatagcagaccagtggtggcgactcgatcaggacatccagcttcgccgctggcgggtgcgcatcatggctggagcgctccttggaacctcctgcacgtccggaagtgcggcgcttctctttgctgtggtcccggagagggtgaatgaaatgatccattgagaatgatagacggcgttcgggagatcgtgcgcgctctgccttgtgagctgacttctttgtgtgtccggggatctcattgacggagagagtcgaggaggagttggagtgattgggagttgaggtgacggaggagtgtagcgaactggcgttcttaatcaggttggggattagacggcccggcatattggcgactgggttgtagaggctcaattgggagtggggtgatagttgtatgttcgtatgttcaggaagcagtgcggtgagggaataattgagaagcagatgaggcaatccaacacataatagtccctggaagtatgtaggaaaaagatctgcagaagaaagtcaagttgttaagtgcgcgacgtgccgcttttgaatggcaagaacaatcatgtgctaatggactgaacccatggaaaactaaaaatgaaaccccaaaacttgaattttcattctttttccgttctttttttatttttcattgctgtttccactggccaggtaccggggcagtcaatgagaaaaagaaaaaaaaaagaaaaaagccagccggtggggcttggaatagcgtcatagtggggtctgacagtacggatacgtggtaataacacttaaaaatacaccgcattcgtgattttacccctccaaggtcctattttgatgcatttgtttgttattctgagatcatcctgatcaaccaagtcgcaattttgatgcactctccatcacatcatttcatcttatagtttcaggtagcggtctgatgccgagacaaagagcatgaactgtcattgttagacgtttatattcccatggttggaatacaccttaaacccatgtacaatcgacttcataaccatatatctcgcccaaaatctagcatcgcctgactcaacttctaccccacatctcaaatgatagtctcggtatcatgcttcgatcaaagagaaaagaacatcagtaaattccaggctagaccccatcagggcagtcagagggagcacatgatgccacggttggctccagccttagcgtagaacccgtggacaaccgtgcgtaatgactcacgtatctacgatgtaccggttcggctaaaccggtcggatagtgatggcctactcggcttggtatacggagcaccgagtactgatggtatacttcctttagcatgtgggttgcccgggttcaatctataacatacagcctcgaaacttagctatggcgaatgtgaccaatatgaccaataacaggagggaaccttggaggataccccggctttagattatcaatcacttcatagccctcgcgaactactaactatacgacagagatgtgatcaggtgtctatgtccttgactcctagtatgttgtatcttaccttgaaagtgccacgacgacactcctgcaggtatataatgtttcatccctttccaatttctgaaaatactcgcctgtctataaatactctgaaatccagctatactaagccatcacgtggcgtgatggcgtagaatgacagtaatagactgcgcagtggagagtgtccagacctgggtaaatgacgaacaataccatacacagccgttaccataccggtcatgatctcttccagaagatcttcgactagcgctcccctaaataaaatccatattttccgctttgggacaaccaaacgcgatggaaaaggaccctttgcggagctccacccggaaaatttttcgtttcccttttctcctgttgaccgcctgaatgcgacggagggggtgcagtcgtctgatctataaaagtggactatagttaggggcgggcttctctaggcctcggagctacgtattccttcctcgaggtcacgctcgtatcctgtgcgcctctaccccgcactgcaaggattgcattttgcgggggtctgagcaattgcgagatcgaactccctcgacaagagcaacagaagtgaagcaatatcaaaatactgtatctatcaaactgcgatttacaatgatcgtccaaaacgttctagcccttccacttgtcaagatatgctccgtgctcacaaggtcgcccccctgacgaatcactatccccgccgcacacactaattacctaacagcaacaacagcatcaggagttaaccgctcacgtctcacctatgagcatcgggctcgcgcgcagggtgcccaggcactggagctgtagcatgtagcacagacacgttgtgccatatgcatgcagggagcttgaagcattgcagcttgtttggctacgtcgggttagaattcccgactcgtccaccctcgagccatacaacatacaacatacaacatacatatatacggagtacattatagggtccatagatgtttcctcggagcgccagggttctgtagtgagctgacggaattgatcacgccatggcatttgttgtctttgaaccgggctcggagacgcggatgcggtgatgccatgccggttcttccttgcagttcctcttccttgtacttccgggcacgtcagcccttgatgcattgcagtcggtgatttgcattgtcaagctggatcaacctaaataggcattatgataatatattacgcaacgtggtcctgatctgagtaatactacggagtactccgtactccgtcagtatttagggtagtaatatactagtgattccaacgcattatataaagtagctccactgtctcctttccctaggatcattacggttaatatgcttgattcacggctcggaaatcacgatcgcaaatcagtggctgtcgtccgccggtcggatggactagccaataattgctgctaaatgggacatcggcttctcaggcgagctgcctctttcggggcgatctcggattgccccgatctgtttccgccggcgtatgatccgcctttttggggctttgtttttttcgacatttaattgccggatttgcactccttcgattgtcgggaaagagtaggtactaggtacaaagcacatcgtggagaaaacgtgctccgcacattgaaccatagatcatatgggaataacgccatctcgtcataatcccaagtggatataagtacgtacctaagcagaggcgatgtgactacgggcatcgtactgtaaagccttacaaattacctcgattttctgcattttataagcgctcgacaatagctggactccgcataaatcgcgccattttaaaaaccgcaaactagagctgaaacgaactggaatgagaaaaatagttccacggacaatggccggggctccgctcaagcgcgggaaagcagaaaatttctgttcggtcatccactcagaactttatactcggcccgttgcaacgtgatctttagcctcacctctgcgcggcccgctatggtaactgtcatccctggttcagagtcccccctgggtgtttctcctggcttaattggagcatgtatagtgcgctgtacagtcgctccaccgtcgatggggcggaaaccgtactttcaactttttctaggttatgtgttggaggctagttggtcgtctcttggggtaacaattagctaacctgtagcttggcagtgagacgttgttatgagacccggcccgttagccggtctgatagtgcagtggcttcgatttggctggcggtgtggatttcatgtgttggtattgggctaggctcgtctatcagaataaagaaatatatacggttttatagtcgctggtcaaagcgatgtaacgaggagcataccaaaaagaaagtagcttcagtgttcaatccttgctcgtctcagccttttgtggcttgaatagactctaaataataccttttatatacatatcgattcttatcagatcttgcctgaaggagaccatgggttcaaggggtgtaagatatttcaattgtctgaacgtcttctctgccatctattcgcaggcgttgcattattgatctatggaaagtgaatcaatatcaagagcaaagcttccaccgtttatccggaacggcggtttcgaaaaacgattgaggtcgtaacttcgaagcaaagaagtaagtctgttgagttgatagaaagaggtgttatcgaaactgttggcaaattcaacatctgatgcacggagaaagtgtagaaagaattggtctgactcaaggcgtttcccaatgagacatataggtgtcacctggtaccgatgctccattgatctgatctatagttacacatatgtggtgctccaggctaaggcctgctacactaacctttgccttctaagttctaccttgagatatctatccatctcatcgttataatccatcaccacttgggaatcccaagctgatcttgaaggaagtgagttgtggtctacggacaccaaccccgaagatataggcgatatatacatcgaaggcttcaaacggggaataaagacattccaacatgagaaataacagacagtgacacaagacaggctggcgatcaggggcttagaacctctcaacgggagagtcgggtagcgcagtcaatactcaaaacgaagactgcaagctaacagaagatgaggtaggggaagagaggaaagcaaatccattgaggcaataatcacgtcactccccgacaacaaacttatgttgtatagtttagcatgttgaatcggggtcagtctactttttagatccttttgccaatggtgaggcatttgatcttggttgcgctctccaaaaatagttattgactagttaactagttagttatctggactgattgactaagggggtaaaggaggagctcttcaagatatgtatgtataccgcggcgtcgtgcataaatccgacacgtgacccttccgagtgtggatggataggaatcacttgagcttcccctattcggatgcaagctcaggccaccgtgttctttttttggattgtttcagcgtcactatgggcttggctgttacttctcctcagaagtagttgaccgctgtatcaacacgagtgggatgattcgctgttccccaccatacacatgtcttgactttggtcgaccctgatccacccgataaacaatttcaccacataacaattaagcactgcattgcaccaatctcggcccaattaccatacctaccgtattatcaccctagatcgatcctcaatccttcttggaacacgaagaaacggaaccacgaggcgtggaaccccggaatctccagacaactcgtgcaaatccgacctgcaccaattgaacacaatgtcgacctcattcaattggaccgcgttagcggtagcaataaccgcagtcttcatattctggaccttctcctcaacgtcctcctcacccttcacacggtccttcccacgcctcgaaaacaagcgcatctgcctcctaatcgcacacccagacgacgaagccatgtttttcgcgccaaccgtgctatcactcaccaagcccgagctcggcaaccacctaaagatcctctgtctcagcaccggtgacgcagacggcctaggcgagacgcgcaaacaagagctccaaaaatcagccaagcacctcgggctgcgcagcgaatcggacgtcttcatagtcgacgacgtgaaccgtttcccggatggaatggacaagaactgggacgaggaccagatctcgtcgctgctggcctcggctttcgcgccggaaatggcggcccagaagaagctgcccggcaagcgtgtcgatcgtgataaggctcctgccgctactatcgatgttattatcacattcgacaagcatggtatcagtaatcatcctaaccaccgctcgttgtactacggcgctgtgaatttcgtccgcacgttgatgaatgataagcctgggtttacttgtccggttacgctgtatacccttaccacgacgtcgctgtttcgcaagtacgcgggtgtgcttgatgcgccgctgtccatgttccttggtgtctggagtaacctcattgctgggttgacgggctcgaagaagaagggtgcgcgggctgaggttggtcctgcgcggctgctgtttgttagctcgataaatgagtggttgactgcgcagtctgccatggtcgtctgtcataagagtcagatggtttggttccggtggggctggatcactattgggagatatatgactgtcaatgaccttcagcgggagaaggtctagatgactgccctttccttgttcctgttttggaattctgatgctctggatgaagagctagcttcgtaactgtgctgcttctgcccggatcttgtgtcattttggccgatcgcctttgctcacgcttcatgtctgcatatgatctctcaaggcctaggtgccttcttgtatactcatctctactattcggcttacgcagctcatgtctcgagagccttcatgatggacatacatgtcctttagtacggaaaaagtccagagacgaaaaaaacacgaagtgaataatcatactgcagatgaaattgtacaattggatatcatgaatggtggacatcaagcacaaatgcttcaaacgatacaaaagaaagccccggtcaacaccaaggattgctatcccgccagaagatagaattctggggtttggcatcaaagcctagggcatgaatgcgaccataaaaccctgccgaagggttgttctcttgcgacaaaggatgatcttcggggtaatcaaccctcgtcttgagccttctgagcttttcctttaattctttggtgtgcttgacctggaaggagtagatgcgattgagcggcgaaatggacgggtccagctgcgggtactcataaagcaagatttcccagaatatcctgtcatcgagaactttgggctcaactggatggaacagttccgacccatttgggttccgccgcgcatgaatgcggccatgcaggctcatgtggcggctcttggaatttgtttggccttggaaatcgactgttccaacatccccgtctctatattcgtacctattacgctctggcaggaagtctttccattcttccaatagcataggccgttcttggagttcccagactttgagcgatatgtcgttccacctctttgtgatgatcattgaataggctatgcgttgcatttgataaatctgttggaagacttcgagccggaggagatcgtatgtgttgatggcttcagcgagcaggggacaccgtagtagtgacaggtctggtttcacgccattctctcgttggtacttgattggatcccgcactttcctatcatcgttcgccggtggtctcatgctgtccaaaactggctgcagacattgcacaaccaaatctctcgcttccttcctttttgccctcgtttggctcaagacgtcatatgccttacgcatgtctgttttgcaggcctccaggtcgccgtccagtttgttggtttgggtcatatatcggtacatttgcagagtcgcaggaacattgtacggcttcgtcgtcaatacctgaaacatctcgcggaccatgtctcttggcactttgcccgttcgcccatcttctgcctgtctccgcttgtgttctttggatagagtaaatgtcctttcaagcaactcggaccagaccttagctgaaatggtgatgttgtacgaggaagccatgaagtcgactgttctcgtggcggcgtatatgtcgttgtttgtgccaaaggcatgagcaacggcgaaaagaagacgctcggttgggtacagaccggaccaagtctcatagggcgtaacgggcggcagcattgagtcgtccctctcagtcaagagggcatcaacatcaacattccatacagtcttgaggatatttttggcggcttccctgtcgccaactctggccgctgcgaggaggatgttaatgtatgtctgctcgtccccagtaagcccgtcctggctcatttgactgaatatatccagcactgttcctttgacactgttccacgccgttgcaaagccacgccatccaggattcggatctaccatgcggcgctttttgtagctgtgagggatgatgcgagtattgtatgcttcttttcccacataacaatggttccagaccaatcctgccatatagtgattatagcacgctgtgtcgggagcgacattgttggcatgcatcccatcccaaagggcattgacgagggggccatttcccatcgcctgagcacagtcgaagaggtgagtgtactcggctagttgaggtggatacccagccacggttcgatactggatgatcgtgagcaagtcccttgtaaagtcatcgaacaccgcttccaatgtcttgagtcctagcatcaacacgccccacccgtgcagtgtatggtggagatctcggtagggtatcacgaaatgagccggagagaggaggtgcagggcttcgataaacacggttggcggcagcgatcccactagctctaccgaccgtggatcagccatggcttccctcacttggtttggttgtccgttttcaataactcggaagaagttcgccctgtaccgcgcctcctcttcgggtgagatccattccggtaaagggacttgtatttcattttcgaaagtcgcaggacgtggaacagcgagttcgctggtccgttgtcgacttgttgtagtcaattgccgtatggaactatgatagcaagtttgttgtgttctttgcgcaaaaacatcccatgtcttcgtatttggagatgccacgacacaagcaatttgcctcgggccactgagatgaaggtatgggggaaattgtgtgggctttctgatgccggctccaggacgagacgagacaccccagcgagaagcgcacttctcggtaagtgagaactttagcatggggaaatgatagcgaggaatcagtctttaaaaaacaaaaaaaagaaaacaaagagcacaaaatcacaaaacgaccaggggcttgaatgaggggaaggtgcgcttcgaccccggatcttttgacagggtacttcatgcaagttgtgattcaaactaagcacaacaagtacaagacccctgtacaaatggttaggcgagactgtgtcagattacatgattctatgattattacatgtggttattatgtggtcaactacctatatcgcacatgtacagacatccaattccattgatccacctctatacatcacccctgggctgtctagatcgcgtgtggatacttgcaagacagaaaacccggggtaattgctgactcagcacacgttctgccaagcgccacgctaagccacattgggtaccagccaaagctcgttgattctgcgtgtggaccggcacttgacccaaatccaatcacccttctatcatggccgacaacgaagataccggcggtccatccgtctcagagcccctggatctcgttcgtctctccctcgatgagaccgtgttcgtgaagctgcgcggtgaccgtgaactcaagggccgccttcacgtaagctacccccaccttgcaatcttcagaataactactgactatggtacgtgtgtacaggcctacgacagtcactgtaacctagtccttggcgatgtggaggagacaatctacgtggtggaagaggatgagaacgaggaggagactttgcgggtatgggatcatatgaatcagagaagtttacgcgggcataggctaatctaggttatcggatacagacaatcaagaagcaagaagagatgcttttcgtgcgaggtgagttggagcaattatggaatatcttgggtgggttgctgacttctacctaggagactctgtcgttttgatctctccccaggcatgacgagcttgatatgcccttgatatagagcacggcgtccagcgacgggaacaatactgggaaggacacgagataccacaaaatgcagtcaacatagataggtaacgataccatggaaatcgattatgatcatccatactagtcccgttggatatagttggatatatatccttggaagctagaggaggctgagtattccatatgcttcgacattcttcctagtagatttatattgagtcactggtgagccctgaagtctgcctgggcggtcgatgactcaactggtgactccgacttatcgataaagctccccccatgcccctttgtaccttgtactctcaaccggaatacttcaaatattcacttcagtctcttttatcttttgttcattgagcaaaagagaactatgatcactcgaataacacttcaacttcatatcaacagtaacggtggcccgatccaccgaccaataacgtcactaccccaaaaggcggcaccgcgatcagtcaacggttgaacttctcaactccacacaatgcctccaaccgggaaactaagctacgaggagcgaaaacgaggtgaagtggtatgtgtctccagggaatatgtgataagtgcctcatcttatgctcttcaacttaggctctcagtgaattcgccgagtatgccgataaacagcaagcccaccgctccggccaagtcgcacccagcgacagcagatattccaccgccagtgtgtcgcgcgatctagaagatcatgcagagctcgacattcttgatcagctagggctctccgatgccccccacgcggccaagctgaaggagctcctactcggtacaggcgatgccgttgaagacagcctgcaggtgctagctgggacattacaaacacgcattgatgaaggccatggggagaccatcttcgatcttgggttggaggatggtggtgaatccatgggcttcgacctcgatcaatggaagacggcgctgcagcgcctgcgcgaggcggccgagaccatcaccgcccactgccgagtattgctgacctacaacgtcggaggccctgaagaatcacctgtcacgcatggccgagtacatggcgcttggggcaaggtcctcgtgcgccatcaccctgataccatcgaggaaatggcggagctccggattgccgtagtggggaatgtcgatgctggaaagagcactacgctgggagtgctggtgaaaggtggtctcgacgatggacgtggtcgtgcgcgaataaatctattccgccacaagcacgagatagaaagcgggcgtaccagctccgtcgggttggagatcatgggcttcgacagccgaggtgaaatagttagcaattcgcaaggccggaagctctcctgggaagagatcggcaagcggtctgctaaggtcatttcattctccgacctggcaggccacgaacggtatctgcgcaccactgtcttcggtatgttgagcagcagtcccaactactgcttgctgatggtcgctgccaacaacggtcttatcggaatgagcaaggagcacctaggtatcgctttggcccttaatgtgcctgtcatggtcattgtcaccaagattgacatctgcccgccaaatatcctgcaggagaccttgtcccagctgaccaagattctaaaatcgcctggcgcacacaagattccaatattcgtcaagaacatggaggaaaccattaatacagccacgcaatttgtcagccagcggatatgtcctatcttccaagtgtccaatgtcacaggagagaacctcgacttagtacggaccttcctaaacatcctgccccaccgcggtcaatatgaccccgatggggccttcgagttcctgatcaacgacacattctctgttcctcacgtgggtacagttgtcgcgggcgtggtcaaatctggtgtcattcatgccggagactcggtcatagtggggccagactcactcggccagttcaccaccacagtcatcaagtccattgagcgtaagcgtatcccggtgaatgcttgctttgctggccagtctgggtctttcgccctgaagcgcgtccgccggaaggaagtgcgcaaggggatggtagtattgaaaaagatggatgcccctccaaaggtgtatcgggaattcgtcgcggagggtaagtcgtcaattcaggttttattgaccacatgctaatgaaaatagtcctaattctttcgcatgcaactaccatcaagcctaaataccaggctatgcttcatgtcggggcagtcagtcagacatgttcagtcatcgacatcgatcgccctttcattcgtactggagatcgagcgttagtcgcatttagattcgtacagcgtccggagtttttagcccccggggaccgtgtcctctttcgtgagggcaaaacgaaaggactgggaattgttaagagcatcgattatgacccgaccaaaccgttgagtgcaaatgcaaaggagggagcttccacttctgcacctacgatacctcatgattagatttactgttgctttactttcaagggagattctttgttcttctttctttgttccttcacgttttgatattttccttgctaagcgttcagacatcgaatccttttgtttggattctatttgtgttttatgtttaccctgttaatacactggtcaattggctatgagctggctagattactgtagttctattattactaccttgtgcatctatttgttgctacttgctgtagtatgaggtcacatgatatatattgcttgacgtcactctatgacatacgcccagaggatcgccgctttcttacatatgtagcagtccagtttatatcactggatgatcattcgcaagccattgagcgatcagtggaattatatcgggtcttacgaaagactgggggtccatgtgcaagccaccgtggcccaacaccactgacgtattgaacaacgcggcctcagcctgtgggttcttaaagcttgacctgcccagagcttctaagcattcagcccactcgccacttacatttcgagtataccaaacaacgctttatcccaccctgctattatcatcctcctttacttagtatacttcatctgttgtcctatcatcctttcaccaaatctctatctatacccattcgacatctgaactataccaacacgatacaatcatggagactgtcaccaaatacgtcaacgctgcttcgactgccatctggggcgagaatgactccaataatgcccaacagcacggcgaagagcccgcatccggtgtgcaaggccaaggacgtatcaccgacccctatgatggcggcaaccgcgatggtaagtacaatagttataagcatatgtttatacaacctcaaagcacataactgtccaatatatctaacaatccatccacagagcaacccggcgcaatccactcaaacgccaacaccgcacccctaaatgcccacctggacaacaatcaatcaaagcccgaggtcactagcatcactaccccccatgcccctagctctctcaccgcctgcaccagcatcacacccgctctgcctgtctccgacggccctacagcagacagcgaagacaaggaaaccaagcccatctccagcggatctatagcagacagcgaaagcaaggaaaagaagcctgtctccaacgactcaacagaatccaccgggagcaatgatgacaacagttctaaacaagaacagcgcagcacttcacaggctgaaggtggcgagagcagcgaagctccccacacaagccgtacccatgacgtgagcaaagaggcgctcaaaggcccgcagggtcctgcgccgacgcctgctgaggacttcgagaaggagtataggggaaagaagcctgcagctgaagatgaggatattgagaccagtatgtttcccttttcctgttctcgctttgtcgtatttggtgctgacttttgttatagattctccaagtgaatctagcgggaagtcgcctttgaagcctgagcgttctcctgaaaacggcgagaagaatgggaagctctcaaaggtgaaggagagcgtcaagaagcatcttcatcattcgagcaaataagagcagcgtctttgtttacatcggatctatgaaattgtgattgtgatgatgcctcagttactttgacttcggatttgcctttttggaattttgaggtcatgtctatattatgccggcttgtctatttgacacgccttatttcgttcgggtgtattaatatccaattgtatttcaatcatttaaaatcttctttgtaaatgtgatgcaaaaaaacaaaatgagatttctagggctataaattggaaataaatggtaatttacatttcaccaaagtccaatctcaatctcaaatccacacacgccggagcagggtatcccaagtgtaaacagaagcaagcaaccattcggccatcgaaacaatcactcgaacaacattttcaactcttcaagtctgttcttccctttgtcagattcactatcatcgccgccaatcttcaacccaagcgagccagcaatattcattttacgctcttgcacgcgcagcatgcggccttctatggaatccttgaccacgaatcgcgtcacattgacatcgcgtgtttggcccattcgatggacgcggtcgatggcttgtgcttcaattgcgaaactccaccatggatccatcaggaaaacattgcttgcggtggtcaggtttagccctacgccgccggcacgcagggagatgagtaggactgtaggggctggcgtcggggatgagggagagctagactttgcaggcccgcttctccctggggtatcgtcttccatgtcgacgatgtcatcgtcggtaaagctttctgctttggtaaactcggctagaacagcggcacgggccttttggggcatcgagccatcgaggcggagatgcgagattccgactttggagagctgtgggccaattaaatccaagaaagatgtgaattgggagaagacaacggatttggtatttggagggatgcgtccgagatgattaataagggcgtggatcttggctgaagtatgggcggaaggagatagggggtatatgcgacggagggagattcgtggggcaggttgggagctggttggcggcgtgctgctctcagtgtcgtctccgaaggaaactgaatttgaggacgggtgtcgtactacttcaaaggtattctttgcatccactggggcacggcagttgaagcatcgtgccttgacgcccttgttcatttggtgttgcaagaagtcttccaggcatttcttacacgcactatgccagcacgctgttacagctggatcgatcataggctcttcacaacagatagggcactcgccactagactcggtttgaatctgccgaagagcatgggcagtgaacttgaccatcgttctagatgtttctcgagagtcggcattctcgttctctgccgtgaattggtcaatgagttcttgaagatccatgtcatctttgaactcattggttgcatcagccactaccgccgcactctcttcttctgcaacaatggctttgttgcgtgtcattatcgggtggcagcaggtctgacgaaggcggagaatttgagcgaagattgtgctgtaagacttcaataatgtgccagccacgacgttgtcattatatgttcgtttcgctcgggtaaatatgcagtcgtaaatttctcgttcttgctgagataactccacctcttcaatagtgactgtctttttgggcaaagggaccagtgggtcaccctccggagttttcatcgatttagttcgccgaagaacaagaggttccagtacactttgcacgacattcagggcccgcacgtattctttggattcgaatggcacggtgataaacgtcttccagaaggagaaattgctccatggctccactttgaggaaacgcaccaggctgaagagatcctcaaggcgattgacaatgggtgtgccagtcagtgcccaccggtgagctgcttttaactcataacatgatttagcagatttggaacgacggttcttgatcacatgagcctcatcaagaattactcggaagaattccacagagaatagacccccgtttgcacggaggcccggagcagacgactggagaccgagctggcggaattccgacaataccacaccataactagtgacaatcacctgtggagctgtttcatgattggattcgcagcataaatatttcaaattgacagccttgtccgacccgtaataaacaagaactctcaacgtcccagctttgagtgcctcgctttcccattgagagattaaggatgttggtgcgactaccagagtggtgtacggtgcatgcaccaccccagaggagattggcatcatagcaaggtcgttcaccgagctaataccattcgaaacctgtggatcaggctcaactttgtgagaatggaccagactgagcatctcaatggtttttcccagacccatttcatcggccaggattccccctcggcagtgttgctcttgagcaggaaagtcaacactgagatctcccgaatatgggttgacatagaaatggtcgatgtttttaacctgcggtaaatctttgtcgtcaacatccttcctgggccaaatgtattcctcccacaatggatgcattgacttctctcgagtctgcttcgagtctttctcttttgatatcatccaatgaagggcttgttgctggtacttgcgcagatcaagggtgaagctaggtgctggatctgccgctggcatgttgaaatcgaaagattgagctttttgatacaacgtatcgagctgaccttcttccagttcttcgctgtcgtctccgcctgatgagtcgttggcatccttatttgatttgttcttcacgttgtcatattgttctgcaatttcagcggcacgcaaaatgccatctcttttgtgcttttccgtagtcgggttggtcgaggtaggatgaagattgatttcctgaaacaacttcactagaccgacttggcgtagtcgcagattcttctcctcggtgctctccttctcttcaaacagtccagtggatcggttgtcatcagtgttaagagcattgagcgccgcgctttgaaaggcttcctttcgcaagtagactcggagttgtagatatatggtatcgttgactcgcaccttgtcgggtacaaacacacagaccccctcaaaccgacagatcttctgatcaatcagcgtagaaacccattcagcggtctcatgtggcagccttccaatttcttgccccgaggtattcgtgaatcgagtcaaaacatcgcttttgtgattgacaaatgctctgcctgttcggttgcgtttcatagttggctgcgagcgtgcgcgttcaatatggacagtgtctccatgcttgagaaatccgaagccacttctcgttgcccatcctcccacaccaaatgcgccaatataccttgctggtggctgatttggcagtaccgattcacttccaacgggtgtaccagggctaggctgtacacaaagatggggtttccggcttctggccggaacgctgccattgatccgtacaggcttcttccatgatccatcaaagtatatgttaacagctcgctcgatgttattggaagcagccgattgaatagttttgattgaatcggcaggtagttgctctcctacgatactagtgaaaaggtcgacatcgaagccatctgtgatcgtgtttgtggtgttgaccgttacttcctcgcattgttggtctaatccattatggtgtggagagggagtaggcccagcatccgcaatgggtgaccctaggctttccgtcgatcggacttgtgtatggtgctgatctgtttcgttttgcaaactaaaagggctttttggaatgcgttcgattgacggaatctcgtgtttcgggcaatgaggtagggacgcgtctgtatcttggggtttggtgggtaacggtgaggatggagagtcagcgaagaaacgctgtctctttgctgggggttgctctacatcctcgctcatattggctgtacatcgagcttcgtgaggaagaaaaaaggtgggctcggaggagacgcgccgagagacgcggcgagaaacgcggagagtacggcagccgaaatgggccaaattacagtccagcggatcgacgtcagtccctaagggaaaatgttcatggatttgatatctgcactgttcaagacatacgaattctctttctttgaatttctttaatttacgccggtttactatgattctctaatataattctcttattctccaattctgaggtggccagggtatcgctgacaaagattggccggccaatgcctttgccccgattacatcgaatcttttccccagagcttgtcgacatcacattgagcatgtcttttctcaggacagctcggccatgccaggcaaatagagcctgcagtttttatctgcaaagcgtccaatcccaaaaacgacactttagccggacacaatctatttccgcacctattaccgcagaacaagtccaaggcgctcacaaatattgcgttgctcttctctcgtatgaacaccttccttatggtcaccaaagcctactgaagctcccatggaaaattattcagaagctaacataattatctttccacagaaaatatgaccgcccctcctacacactgagtaccttcatcccacgacatgcgcaatccttctatattgcgctgcgcgcattaaacgtctccctctccatgatacccgacaccacctcctctcccacaatcggactgatgcgacttcaattctggcgcgactcagtaacgaagatccttgccggcacaccacccaaagaacccgtcgctatcttgcttgcatccgccatctctgaactccacgagcgcacgcagggccgcgcgcacataagcaagggttggctgacccgtataattaactcgcgggagcgaaccctaacaaatgacccatacccaaatatcgccgcgctggagtcctacgccgagaatacatactcgacactaatgtacctcactttgtcggcattgcccatggcctcgataactgcagatcatgttgcatctcatattggaaaggcagtggggattgcggctgtgttacgtggactgccgtttgttgcgttccctacgccacctgctcaagcgcctcctggggctgcgggttccgcgctaggagggggtgcgaaacaaggagccgtaatgttgcctctagatgttatggcacaagctggtgttaaagaggaggatgtccttcgatatggagctcaagcagagggtctccgggatgcagtcttcactgttgcgacacgggcaagtgatcatttgattactgcgcagcagatgttgaacaacctccgcgccggggaggatgtcggccatgactttgagcatgaaggcgaagagggtcatgaatacgacctttcccctagtgctcggagcagcgagtcaccactcgaagaggtcaaccgggcatttggcgttttcttaccggcggtcggcacgcgcatgtggctggatcgccttgaaaagcaagactttgatgttttcagcccggatttgcttcggtcagactggagacttccgtggaaggcttattcggcctatcgacggaagtctctggaataatggcatgtaggccatgtataatatgtgtaatatactacttcaggttttggaccgttgatgacttcttttgtatatgaggaatgttaaaactgttaccacgatgcaatgttgaacagtgaaatatacatacactgatctctgaaatcatactatcaacaaatgagttctaaatactgtccaagtgaaaagtatctgtacaaaacctgagaaggtctgagcaataaaatgtatcaaaatcaagcaaaccccgcacgcggcaacgcctttatacaatgattgggacagcgagctgtaggacgttcatgatctatttcttcgtcctctctcgtctctgcttcctcgagctaacaatcaaacgtcgctgagcaagcatgacagcgtagcgttgtattttgtcgcgcctaaagatgcaggttagtgtcggctgttttcgagaggaatatcagaactcacatcaggtagaaaatcgtaacgaggacgaacggcactgcaatcttccagaaatatcttctaaagtcagcaacaagtctagaagaaaggggtcgaaagacatacccttcactgtgttcgattcccgcgaaatgcgtgaagttcattccgaaataaccctaaaaatgttagaggattttcttcatagtttcaagtcatacatactgtcaagaatgtcataggaagataaagacaagtcacaagagtaagctgcttcatactttcgttctggtaggcacctgcacaggatattagtccgttgtttttctcttgaattatccatagaagttgaacgtaccaatagtgttgaaaatgaggtcaatcatgttatcagcgttgcgccgcatctgatcgtacccttcaacgatagtaatgcaatgatctagggcatcgcccaaatatgtatggcacatagagctgatcgtaacacctgtgcctccgacactcttcagatttggcggtacagtcccaatatgtgggcggggatcaagaaattctgcaggagttgcacctgggctaaggggattccttaggacaccaaagcctggtgtgccgacgggctcagaccggtgatcacggagagcgttaatcacagccactataggctgcatatggttccgcagaacagcaatctcagatgtcaaaatatataaggactttgactgttcaatgtctggatcagtcagaacctccagctcgaggtctccgatggcgtcttgataagccatcgttactggaatcgcaagatcaatcacagcatccagaatggcctgcaaaagcatactggcatcgcatgactgtcgaaggatagtctctggcgtattgaggcgcctgacaattggcgactcgatgtcatccgcgctcgtttcaaaaaaggaggtcacctcattatcggtatgtaggaagatcgaaacttgttccaaagtgacacataatcctttggcagaaagtgcagcatggcgttccatgaactcaattcgatcttcattcggaccaccgcgatatcgctgaagactcctggcagatgtgtctgtggtggccccaacatttccaaaatgggaattttgtgttgaattttgtccaagcccaggacgaacgctcgatccatatttcgccatatccttgcgctcctgttttgtggaggatctgaacctgaaaatgtccttcaatgccgccataataacactccacttcgtgggtcgcctcaacgaaatcgagctcttgtcactgaccacagaacttttccggtcccttgacttccatggactgactggattttcctcctcatcttccgaatcagaggagtcctcttcttgtatcttcaccaacttttgcaatgtcagtacaacgaaggcatggtccgagtaccaatccactttcgtgcggttagtgtcatggacaacatcctcaattgcaagccgatgcaatctcttatgatttccaagaatcttgatcacatcccagctcaacccattgacattgatccaccggcattgcacccagggctctttctcccgctgcaaaaattgctccagtgtgtcattgtctaactcatactgtcgcatttcatgttgtgagaagtccaccacggtgatctggcagcgtcgttgtaggtccgctggtatgttggacgaccattctgacgtgtatggcggtagcggcttggttgggtcaatgccgggttcggttcctggttgccaattgggatcttgtgcgaatccttcggggtggtatgagcgggcggtattgcgtctggctcggcgttttgtcgtctcggtggagttcactcgtgctgctgtggtgaatgcgggagacgcggctccctctctctctcctactgttggagcgacttgggaactgactgacgggcgacccgcctcaacatcgacctcgggtcgtgtcggaccctgctgtgcataatcgactgagtgtatgctcatcttcacggtttatatagatgtgcacatctaatcgtgacggtggaatgacgggttctcatcggctccggacttcgatatgctgcggctcaatgatgtgaacccggcccaggggttggtcaatgcctggtgggtatatacccaggatatttgtacaattggtgcacctctcatcgagacaccacttcgggggagaacatgttgatgcgtgcgggatatgaatgacgtcgaagagccgttttctgccgcgtcctacagagatagttaagacaaaaccggtcaaatggaaagactgaattttaacatgaaagataacaaagacgagaaaatcgaaggaacgaaagaaaagaataaatagtaaacaggaaaaagaaagaaaaataatagaagacagggggtttcccgtacacagggggcggagcgccttattttattttaagggagaggatggacgggcacagccctataagacactctacttcatacgcgtccagcataggctatggagtacatatcaggactcttgacctcattgagatagattcgtacaagtacatataagtacacgggttccattccatcacatcacatcaccatgcaccatacagtaacgccgtcccaatgctggcttccaatcactccagatataacaacatccacaatagttaaacaagatagggaaagcagagcaataattacagtaaaaaaaggctgccaaagagaatataaaggtaatgagaggaagagaaggagggagacagcattatactcgggctattgcccgtggtttccagggaggacggtggagtccaatttgaggctgtttattcccatgaaaactaggccgggagccgtggaagtcgggatagaggcctgactccatgtccatcagaaccgcccgctggggctttgccgagctccaattggtagaagtacctttcggtttggtagaaggggtgcgaggagtaggagcgatgacactagcagctgcgcgcgtcttctccttgatgatatcgcgaagctctttgtcatctttggtgatttgagctttgatgaaatcaatgtcattggaagcttggaaagcggacatgaccgactcccgtggagtgtatgggtatttgtcgggatttggaggcgactggggtgtgatggacgggtccaagaaagcttcctgatccttgtctaggagctgagtaatatccagcgtttcaccatgcggaattttgtgaggatgagaaggggtcacacagtccatgtcgacttctttgcgaaggacatggtcaatgtcgacggcggagaagtaggcacatgattgggggaggtcatcaattcctacttgctgagagaataaggcacgagtccaaacgttggcaatctgcaaagccattgcagcgcgatacctatcctcatctttgacaaggtagcgaatttcatcgtgaacagtgatggccaagcgggcctgaatgttgaatcgtcggataagatagtccatgctaacgatcaagaggtgaagataatcgacacccgacgactgaatagcccaattgattcgggatgtcatgaagctgcctttattaatgaaacgtcgcatgagcgcctcagtgatcccagcacccaaagcaggggttctaggtcgttcctgatccgcaaactcttcgagtttattgaacacaaaggattcagtgccacctcgccaaaacggcgtctcactcaagaggcgacgtgaagtgcgcgttcccttagtctctttgtacaggttcttggcagtctcttgtgtctgcttttcagttagagacggattgaactggcgaagtaaagtagcggcgaacttgacgcctgccccgtagattcggccgtagttgaagaccttggcgtcattccgcgagattcccagaatcgacgcacttcgtgagtgaagatccgtcccctcagctttagacccttctaagcacatgaagccgattgcgtttcctccgtgaatctggaatggggcatctccgacaagacttgcaatccataattcctgggagtcgacatcggctccaacgaacgagtagcccggcggtgctttgatcatagcttttagctctgacccaacacggttggccttcgcattacttgcagtcaaccaagtattttccacggcgcgtcgagtgatggtccccattggaatgacttgaggcagaataaatccgatacgattatcgccggcttcacttttctctctgcctttttgcgcctgatcttcatagaccacgatttgacccttgattcgatcccgggcgctgatccaataagaacatgacgcattcatatccagcgcttgtttggcaagttcatactgagatgacaggatcccacgttcgaaatactgcatatacccttttccaagcggattggtacacctagcttgtgggccgtccttgtgggggattttgaagtatatggcttttctatcgtctcgcaactcggtgttcttttcctcggtcatatcgcacatgacgactggctgattctcatactgtttgatttgatcacgaggaacgcggaaagtccatccgtgcaggtccgaccaaacaagaggatagttgtcccaggaaagtttgagcagaattggcgcaatgcgagtccgcaccgtcaagttaatatcggcggcgttggaggtaaaaagatccttgtaccacttgggcattcctggtttcttttgcctcgctgccggccgaggtggatcacccttcttctttcctttggccattttgatctcctggccggaccagtccagctgttgtagccaaggatcaatcgtgtaaatgtctggttggtctttatacttcaatgcttcgtcgcatagtgctagtagtttactctggacatcgtccagccgcttatgatatgtttcctctgcgctggtaagatactcttcccatgactcattgactggtaaaatgacggaggataagtgtcgaagagcaccgaaactgacgggatgcgggcaagtctcgagaaaattggggaaaacttttcggtagacacggtgggtgatggcaacatcggcagcacaatagtcgagaagttcctccagtctggccacaatagagtcacgatcaagttcaccgaacagatctctctgcgccttatcgatagtgacatcacaatggaatttggccacatcacgcagggagttcaccgagcttcgcccaacccaaagctcctcctcttcttctctcaacatgttgttttcgagaagtgcggcaagctccacagaatcgtggtcattcgcgattttatctctcatgtcctgattctttttgtggcgcatccaagtcggtctctgttgcgaacacatgccgttgaccgccacatgtagggacattgtgtcgagaaagaagttttgagactgctgcatgttgtattcctcaaggactcgggctcggtcgtaaccaatattgtggccaaccacaatgcgagattgagtggggtctcccaagggtatcagctgtacttgattctctgactcgccaagcagccacggtgatatccatgcataccaagctgtcgggcttaccgcgcaagccatgaccgcaaatggattatctttgtacatgacctcggtgtcgaatgttaacattgattcatttggggcgtcgacaggttcagaggttccgtcagtgtggtatttcgtccatccgctgcgttggacccatttgcgtggtttggccggacaggtaagagccgcatatgacttagcccatgacaggtatggttcggaagaatccattccaagtttgtagaagtgttcgtccaacgtttgtcccttgagagcaggaagatcgaatgcgataggaccggcgccattttgagatttgcccaggagctcatgtcgagctaaatgatccttcgagagagcgactagttctgggtccggaacgcgacctttgttggggaaaacttgagcatggacatggtcgctgagctgttggactccgatgtcattgaatctggatgaggaagggactgcgcgagatcagtaattgcgatttgattgttttcttatcgagaagcgcaaaagacagggcacccaccagaaagagatcgtcttgtggtcacattgtcggcggaagtagagaataatcttgtatgacttctgtctgactggtagcacgatggcggcttaaccaggaacggcgagcttcgtcgcaagaaagattccacggcacccttggaacaaggagtgcaggagaacttccaagataacatcctaaataagaatttggcaagtttaggtcatgttagaagtgtggcgacagccgtaaggctgcactagtagcctgaaaaaaaatccgaaaaaaagaggtaattatgaagatggacgtagctaatttccatatcatcgcctatcgcagatccgggcgtcatgcaggtcggaatattgttttccctgtatgcttgaccgccttctcctcgtagacacttttcacgtgatgtgacgcagtagtatccggcggtcacccctccattgactcgctgaccgccttccatttatagatacacaatacgaagcgggcttatctgatcccctatcgccacatgacccagttgataagacccatatgctggccggcattgtcgccatcacctgctttgatcgctgaaaggcccgattttgccgacaaatttcttcttcttaaacccacggtcgctgcattttgtcttagcgaaatctcccaaactctgaggctgttcgtcggccaccaatcctagatcttttcacaccctctcccacacggcagcacagagccgcatacgactttccttctcatctccagactattgccctcgctcaaccttaacgcaaacctctttgaaagagtcttccttcccactctgttacaatgagcagaaacagggctgatgttgtcgacctgacaaccagatcatcacggcgaaatcctatctctttatcctcctccccgcctgccgccccggaccatgcaacctcttcccgacatggacagtttactactacccgcggtgtcaagcgtcgccgtaattggaacgatgagcatgacggctccttcgtatccccttcggctttctccgaaaatgagcccatcgaaacaatcgacatgaccgacgactcaggcgcggccgcactcgctcgaacagcggccaaacagagggaggatgctataaaagcgcaggcttcagcggagagtgattcaaacctttccgctctactttcttataaatgtcccatttgcatggaaacgcccgtggacgcaacgagtacctcgtgcggtatgttcttgattccctactatactggatttaagcatgctagggcttctactgactccttatctttaggacatctcttttgtcacaagtgcattatcgactgcttgaagatgagcgagcagacacgtggcggtgactcttcaaaacaacacaaggggacctgcccagtgtgccgcacaccgatttcgcgaaaggagatgccggggaagtctaagaatctcattccgttgttgtttctaacaaaaaagcgaagtgatcttcccgtatctggcccatagagcctttatacccgcttccttggtctcttcaaatctttgtttttctctcgactcttgcggcattgggaatcggagcatgggcatgggtggtatttttcagggttttgcataagcgttcacgagctgggattgacaaatggagttccaaatccatggattccattgattaatatggtgtgtagatgtagttgtacctcgaactattatagtacaatattaacttctaaacagacactattgcatatcctttcggtctcttcttgcaggatcaagtgtattccgtcgacccagcgcatttcccaatcccccacgaaccattgcatcccccttcttccccaataccacctcaatggcctgcacaagggcattggggtcatattgcatccccacaacggtctccttatctccatccctggccgtggtttttcgtccatagagacgaagcgtttcaatgcccatatgtgtgagccgctcacggtccacatgcggtgtccccggaccatccagatgcaagatatgggtcacatagttggtataaggaagggctctataatttcgaacattttcttgcaccgaagtagtcgctgagttgtgactttgatgctgagaatgaaaaatcggaccccgtccacggctctcctctccggcgcttacaattgcttccacaaaatcagacgcgacaaatggtgcggatggaggccctgtttcccgatccaatgatccgttcaaaatgaggattttgtgtcgggcgggactggagacgatgcttttgccgacgcctcgcaggatgatagcagggatgattgatgtgtagagagatccgatactgtagataatagcctgggagtcgtttattgcttcaagcactcgcggatttgcgggcggtcggatctcttggccgtaggggttgatgtaccagatgcgagtgattcgagaactcaaatcttcattctcggttttactgaatttgatattcttgttgcggagagttgccagagagccaggaagatgatcctcctcgtatattgtcgggtccgacatttcggaatccgtgtagtcatcgtcgccatcggcaaggagcagacttggtctcctggagctgggattgtgctcgagggccgtcgcctcgcttggatgcgagatactattctgaccgacaatcacagttccatccgcaagcgatgcagagatatggtgggagaaattggagttgattgctgggatcacgcgcaccagatctgacgggacgccgcatatgctcccgagtaggtagatggcactttcgaagcttccactgaacagccgggcggcagtcaagaaaagatttccgacacttgcggaggtaaagtcaaaggttgatgatggcggtcgggctcgtttcagaatttccagatttaatacattgaagaatgagcgtatcaactctttcttggcgggggtgatagctgtccatagcccagacgtgccgtccacgatggactgccattcattggttgcgctgcctgcttccgcagacagccgatggttaaacaatgccttgacagctgacctctcagggtttgtcaacgaatccggaatcaagcgtaccaatcgacctgtccgacaagttagcaaggggagatacgaagtgttgggcgtaagttgtactccgaacatcgccaatcccagggccaccgaatattcgaatcaactcggaagaggatcccccgttatcactgattgggatgatgtagctaagtgggcaattcttgttttcacggacggcgttgaatacatcgacgagattgtttgccgcgctccctcctgatatgacaacaatccctctattggtcgccatgggcagatatttgttctgtcgcttgtgtccaggtgataaatccgatggggagggacaaatgtcgagtgaatattcagaagagtgaaatttaagacattggggacatgtctgggcccgaacgcgcaacaatgacacatttccacagccacaacacaagaacggccaactttgcgcataaatagtttgagcgtttagaattgaaaacctcttttgtgaataattatcagattcaaatgggtctacaatacacgacttctagtctgagctatttatagagtcggttgactatggtatctctacataggtagccgttgatttcttcggtatagttgtagacataccaaggtcctatgtgccatattctcgaaatattttaatttgggctttgctacgagacaaacaatgttgtggaatgttcgtatcgaacaagatcgtcgacaaccattcagtatcttcaaccctatctttcctgtagaccgacgattccgtaaatttgatgatataagtccactaattccagactagacatgaggagtggttgcaaaaggctactttcatatcaatatccccctttaacctggcaagtgtatactgagatgtctatatctgtcgaataccaggctttgcacccacttgtatcacgatcgatgtagacgccgagaagaagctcgtccgaaagatcgatctctatttgatgccttcagtttttattctttacctgttttcctacatggtattttaatctatcatatcaattgccaactatattccgctaaaagtaccaggacagattgaatattggtcttgcaaaaatcgccggaatgaagaggatctgcacctcacatcaaatcaatactacactagtgtgggttattggctatactatctctggcgtaccatccaagtaagatgagagcctttgtgtcttccacatgaaaagcgctaagactagattcagcataattctctctcggactcgcttatcagttttccttccagtaatcacattcgcatggggatctattgcagccttaataggtgctgtccgtcatcaaagtcaactgatagctctgaggttccttcttggagtcttcgaagcagggtttagtgtgagtgactctatggatgttataaatccgcttttaaatttgataaagccagccgtgatcttcttaatttctacatggtatcgaaagaacgagcagtagattgcttatacaattatacaacagcacagccttgaatagcgcttactcgaagcagatcaaagcggttcattatcttcctaaccgcaggtatactcccaggagcattcgggggagtaatctcaggagctatcacatcgacattagatggcgcacacggtatccgtggctggagatggctcttcattgtcgaagggctcgcaactgccgggggaagcctgatcgtccactggactctactcgactaccgcacagcagtcgcgggctatcccccgaagaacgaaagctatcccaacagagactcctcgaagacggaatcgccgatcaaggcgactcgaaagaccagaacatctcgatcttcgtgcttttgttcaaagctctctcgaattggcaaacctgggtactgatcccgggctacatgaccatatcgggagctggggctatttcatacttctatccaacgttgattcacgagatggggtacacctctaccgccgcgcagtatatgacggctccgctctatattgcgtctctggctgcggctatccctatttcctggttggctgaccgcaaaccccatgctagggcacaactattgatgggagacatgatagtcgggatggtgtttttcgctcttatagcgggcattcgaaacaatactgcgcgatatttgtttttgtgcttcattagcatgactttttggacgggaagcgcgcttgctctttcgttttctcctacgtctctggcttcataactgttggagcgcggtaaaactaggcacaatgcttcgtcttatgctctcgaggggtcaaatgcttagtgtttgaacagacaaacaactaggcggtcaaatacatgagatcaaagtgtatattcaggtctggaatagtcaatttgtctggtctgatattcagtacaatctggggctttctttatagcaagcaaacattgcggatagctcggcaaatactgagatcaggttgatctcataactgactagatgatttcatgattttttgatcagatgaagtcatgacttttatcagatgagatgaaacagaataaatagtgcaaagtaagcaaacaatcaaatatagaacacaaattccaacacaccccttcagattttgaccttagtcaaaagctgcaattatgggatgaaaagctaacatagatcaaacattgtcaaactcagtcacccggttaggtaaccgtctcaaattcagctgattcaggaattcaacatgcttttgggacggaaggtgttttgtcaatccgtcggcgatcatattgtttgtctgaatccactggagatatatatctccatttcttaccttttctcgcaaccaatgttgattgatgtccacgtgacgtaattttgtctgatatgatgaattgggtttgatcatcagatcaatggtctgtttattgtcacatgatagtatcagatcgttttctgggtcaaattcaattgatctgagcaatcgtttcgtctaaagtaggtgctttgctgcctctgaaagggcaacaagttctgcttcggttgttgatgtggtaacaattcgttgttttcttgctgaccaatcaattagaccaccgaaaagggtgaaaatgaagccttgagagctttttcgtccaatgttatctgcaaaactggcgtctgatgctgcgcgaaagacgtatttaggatcacatgacccgtcgaattcaattgaatgatatctcgtcccataaaggtacgatattgtttgttctgcagcgatcacgtggcttctttctggcttagtaagccattgaaaaaggatctgatgtgcaaatgcaatatctgggcgtgtcattattgcagcaaaaccaattgatcctaccaatgatcggttactcgtgatgttcgtgcgatcatgctcgcgtggatatttgccgtcggggctgtttgttatggcctggtaggtattttgttcaagcgttatccatgaaagtaatatgataactgcgaagatgtctaccttgagacattgaattgcaatcctcatacgcaatggaatagcaggactagatatatagttgacacaacatatcaatttcatacagccgtttattataaatcctatccccaatgaaaacagctaaatatcgtctatgtcctctacctgtacatgcatgttctgtcctgtccagacaagacaagacacaatctttatcaaaatttaacataagcatcggaataatttacccgagcttggattcgtgaaacaataggtccacgcggaatgtgctccgggtattccaaatttccatcgattgcttcagttcgccaacgtatgcgatttcgtgcttagtgagtcacctgagcagcagcagcgggggcggaagagctaccactgtagaggacaagcagaatgagaacgcaaggcacaccgatgaggacggccttggtgcgggcagggttgctgcggttgtactcaccaacctggaggcgcacatcggtaacaaggctctggcacttctcagcaccgagcttgtagtacaccagaccagccagggcaatagagtaaccgaagaactgctgagcagtgacggggtcgcggaaaatgaacatggaggctccgaccaggaggatatccttgaggataccggccatggtcaggacaacagcagaagtcttgccaatctattggtgtgttagaagtagttactatctgtgggatgaaatgacttaccagcaaaacaacagaggcgttaagaaggaaagcaaccagtgcgttggcaatgagagttccgataccgagaccgtagatatcacccatggtaagacggggagcctcagcgaaaagggtgacgacaccgttagtgatggcgcaggccggggcgtagtagtagagagagaccaaggggtccatcttgaactcagcggaactgagcaaacgctggaccatgacaagacgaagagcctcgaagacaataccggcaatctggactgtaaggttgttaggactagaatgtcaaatatatgagtaggacatataacatactgaggaagccgaccatttcgaacttgatctcgccgaacgaggcaatcacaacaccgacaacaatgagagccacgttgccgagagtcttcaagttggtaggagcgattccgaaagcccaggtggccaacagggttgcaacagcgttggtagcctagagaatattagcattgagtcgaacctagcgtttaagagtgggcggagatcgcaattgacgcaattgaggtcaacccccggttcaaacgcaccttaagcatctggatgaaggaaacactcaggtagaggtatgccaagttaccgcagatcagactcaaactgaacatgataccgataggcacaatggcacgtctgcattgcacaaattcaccggttagcgatcgagcattccggtcggactgcggccgtcctagctatttcatatcttatcggagttgctcacgtataggtggccgggttcatagggaccttgtggcgggagtcaagcacggtagtgaaccgggcgaggatctgggtcatcgccgtggcgaacaccatgtgccaggtggtcaagaagagcgctggtggctcatgtcagtaattgattcctccgggtgcggttgaaactcgattggcggatggactcacggaagtctagaatcaatagcggttagctgcacagtccatcatgaataggggatcagagataaggggtccatactgaacttggcactcgcaaggacccatttgttgaataggatgacgctggaactcagagcaatccacaggctagagagtcgagtcttagtttcatacccgacgaggccttcacgtagatgttacgtacgcaatgtagaagccggggtggaggccgttgtccttgggggcaggagcaccgccctccagcttacgctcatcctgcgacgagcgaccgtttgccatgatgaaagttaaaaaaacagtataaaagaatgactgtggtgagtaggaaaaaaaagaggtggttagaagggaagataaggggaagaaatgatttatgaacgatcggcagttgaccctatggagacgctccagcgcgcacttccaatcacaacgtcggtctaacaggtgtgtcgccccagtgtttacacgtaatccccaagccctgtcgagctgagtcctctaagagggttccagggttattggggatcgagatttttccggtttatccctgtcgatcatagcacagcccacctcgaagtcttcttttcttgtctagcgtatcacgtctgtatgaggccaattagggtgatttaaagtcgattgccaagaacacagggggaagatgtagtgagacaacgacaaaggaaaccaatcacattgaaatgtgcaaattatactcggtacatatcgatagagtctattgctgtatgttgaactccgtacaatctaagacataatgtacgacgtacggcgtaggacatcctgacatctgatgctgtagagtacgttgcacttacacgatcacgtgacagggatagatagattttccgcgtccacatcattcattacctaagacatctcctccgaggttacggatgttccgataaacaattgtacagacatcgtcacttccaacatgccagagtcaaacgtcgcggcggattccaaaatcgaccatgctgcctccttaaaatactggaacagcgtgccagccaccacggccagcatgctgggcgagttcccttcagtgtcacgcattgatctacaggggtctaaaactttcctagccaaggtccgccgtttactacccaaagtccagtctgaaggcaaactccaccggggtgtggactgtggcgctggcgtcggccgggtaacagagggcttcctgagccacgtctgtgaagtggtagatgcggtagagccggtagccaagttcacacaagtgatgaaagacagccaattgaaacgagacggcgtcattggaaacatctacacgcgtggccttcaagactggatcccagagaagaaatacgatttgatctgggtccagtggtgtgcgggccacctcaccgattcacagctcattgactctaccgtgcggtgtcgcaaggcattgactgaaaacggcctgatggtcttcaaagagaacttgtccactcatttctccaaagaagatatgtacgacagtgaggatagcagtgtcacgaggaccgatgcgaaattcagacaggtcttcgaggcggctggcatggaggttgtcaagtcggaactccagaagggcttcccaccgtctttcaacctcttgcctgtgcagttctacgccttgcggccgaagacgaccaattagccctcgatgccttgtgtctatcatttgatccttgagagtccatgatgcaatattggtatctacggattcattattacttatcgaacgagtaattctttgcatgcttgcaaaaacctggaatttccgctctgaaatgcgtagattcatatccttcaatcgcccaattcgcatggaccgttatgtacataataaccactttcttcgacggccatggtcgtgtgagaccaaatcaaaattcatacagagcgtctgaatccgctacagaaaagaaagaaaccttaagtcgtccaccagaaaccacatccctattcaatttctccggtggagtccacacaacctccgcaacatttgttcgcggccgagacacaccacacccagtatcatctctatgatgaaccaacaacaagtctggccgacacccctgtttcacacataaacccgaataggacgcgagcccgatagccgccctggctcgtgtcgagacacattcatagagtagctcagcatccgcctgacttccagcctggtagattcccacgcccaggcaagccaacgataacggatcgggcaaaccccatggcgtaaatgaattaccaacattgttcaccccaatcactgcatccagatcatatttccggatcatctctaggacctgtagagtgcctctcggacgatcttgcggaggcttgcagtctccgctcgttctgggaggtgacgccatgtacatatcgcttgttggcagacccacgaagctgactgaaagttcattctcgtggatttcagttgccagtcggacccattcggtctccgtgagtagtgtcagtcgtgtacaatgaccaagcatgacacgcttgtctgttgagtggatagtccagcttcgttgtttgagggtctgtaagacatgccagaccagagcctctttctttgaatcgaggttgtaatcgagatgaaagtcgacgtgtttgttcagcttcaaggcacgatcaattgcccattcgatgttttgcttcgcagcctcagggctagattcgacatatggtgttgtcccaataacatcgatttgcgaatatttatgaagagcggtttccagaaattccatattttgctctccgtattcactagagaatataggatcttgtgcaaaacagacgatttggatatcgcaagaatctttccattggtttttcaaagcaacagcggcttctagacaaatcagctgcactgtatggtctacctccacaaatgctctcattgcagtaacacccgacgcaacggactcagcaagaagccactctcctcttctaatgatatcagaatggctgaattgttgtttggccttggtcgtggaggacaaagcctcctgaaatgtgccggctgtaggtagaaatggggcatattcaggtgcgctgtggataaaagctttatcgaggtgaatgtgagggtgtaccaacgctgggagggctagaggagactcgaaatcatccttagtagaggattcatgcggggtcacagaggtgactgtgcctcgaagagagtctctagggtatccaatctggatatcccaggtggacggctctcctgccagtcgaacaccacgaatataattaatctggctcgttagtcgtggcggagacatattcttgtgcaagtgaagtgttgtctgagttgaacgctttcccgaaatcccccgcagcgcgtggggtttacgggcttactgataacacaccgtggacttctttgaaatgacaatatattcaacaggcttaaaatggtagtctcgatgatcttcggcacatttaaacccacaaatatacatgcaaatgcgaatcaacaaaatactatatttacccaagtatagaccgagggactctctactaagctccccgaactaatactcgcactttctggcggattgtcttcaacatgctgacgactgtatccgcggtctcgcaatactgcgcccatggttcaacgcattgaattgcttccttcactagctcatcgaagtccggaacaaggggctctaaagccggcgtggttttcgcagtcgagagagtaaaaatggcagccaaaattctagatgtggaaagtaagtaaacttcgcctactggaccaccttggaccggaagatatgatcttacgcttgcattcgatgccagtttgagtgtgttctctgcatcataagaagcgatgccgcccagatgaatttgcgacagctatcaacgcacttcttgcaattcgcgaaaataaattctggcaatactgtactgccctggctgtgggcagcaaaaacaaggctcggacggcagatgatgtgttttgtggcatagtaccgggcgagaatgtaagtgtcgtaagggtgatctgcggatattgaattgcccagggttggcctgatggggtttgggagcgagccaaaccagtcctccaattgacgatcgagctcctcgctgattgtcttaagagatgtaatcgactgcttttggggagtcacactgggggtgtcacttgtgtgttggggcggagggctggtatggaaattagcctgatcgggttttgcatatagagcactgtgcacgcggttgagaagctttcgaatcgagcacatggcgaggaatacaagatggccgtttcggctatcttctgaaattcgaggaaagggcaatctatccacgaggacttcaataccactgggagggaaattaaattcggcgagatcgtcactgggcatagtttgttagctgaatgcaagataatgccagatagtatactaaccattcgagaatgaagcaggcccaagctatccgatagagactcgctcgctcttcgtgtgtgttcatgtcatgcagtctatatccaatccgtgtcaatatcctagcgggaaaatatatcagaaaagacactcactcagatatcatgatctgcacactaccagatgcttcacgaatcatttcccatgcttggattgggcgtcctatgtagcgcagatacaacgagccgtagaataaagctaaaggcaacaaatggtccgctgcaaaggacgttatcaatgggctgttcaagtagtgatatgcggaagcgaaatattccatcccactcaaatccttgtccgcttcaatatcaaaaatccgttgaggattcgtagagacctttccgagagccagaatcacgagataaagtgaagtttggatactgttgaccttggtgtacgttgagaaagtgtcaaaaagcatttgtaacagctgcggctcgacaatcgggaagaatgcatggacatgatggaggaactcggtgattagaggtttggtgacctgaggatgcagtcgggatacgtcgatttgttcaaaagcttgaggtatgcctgcggcctggatactgttgaatggtcgctttttctctatctgcttgaaaaagtcttgagggtagtcgccaaccaaatttttgactcgatccaacgcaaataggctcccggttggcgtatgatgaccgaaaggaatggtaaatgcatattcagagccgtaggtgttctccggtgaaaacaggccgaaggaggatttatcgtatacatgctccggtgatgggtcccagtcgtatttaggctgtgaggcatagatagaggaacttgaccgacccggatgatccgacgaagcgcctactcgggctgcgagctcggtgatggcgtccttctgttgctcgatcagggtttccagatgggtcaagcgaagcaggatttcagcggggatatcttgcaccctgtgaatcgtcactatctaggaacccttttcatcgaggtgacgctttctacctgtcgctttcttgatagacacactgagcccccgcatcggtgcagaggccacatgtcggcttctgcccatcgcacttccgtttcctagtatacgttagtgacggtccaaagcgaggaattaaaagcctaccgatgccgacagaaattacatgcgattgatgcacgcttccgtggatagtcgacgggagggcgagattcaaacgatttcatatttgctttgtgagcaatacggaagatcgacgtcaaatgctcactgcggggtcgtcagcaaacgccaaaacttagccccttaataatcaaacgtgcctagtttcatctgggcgccaaaaacaaaacgaagtgagaaattatattcatttaccgataagattttactcctgctagttgaagcaatcgatctgtgtgctctggcacttccagcggtatatatcgattgcgggggtcgaccttaccatctgggagatgcaccactccatcgcggatcactatgttctcatggggccaatgagttgttgctcggtaagaggcgaaagcttctttctttcgtttcaggctctcttccgtggctagctcaaagggggcgtaggatgcataaatcaccgttcggatcgtattgctgttgacggtgggttccccaccccaatgcaccgtacgtgaatcccacacgattaaatctcccggctccgcaagcaccttggatggtttcataccatgagactcaaaccactggatttcttccgcgctgaacaggcgcaggtccttctgctcccaggtggatggatcggtctcggtgtcgaagaactcctcggttactgtgtttgaccgcggaaacaccataagggatccatcctcgggacccgcatggcttaaattgataattccctgaatacagtggagcccgcgacgcattggcgactgatccacgtggggccatggtttttgagcaggcttgtcttctcggttgggcagagtgatgttcagcgcgtcaaacgagacgaggagctcatcggtaccccagatcttggaaaatgcctccagtacctttggctccatgcgagcatcccacatgaatttctcatgggtgactgaatatccattgaacgtattcactttgctttggaccggtaagttgtcattggtccacgtggaaggatcatcaaggtcgagggttgtgctgaaagatgtaagccagtccagagctttgcgctgatagtcctgggccttttttgggtcgatggcattcttaatgatcgcatagccttcattgtgaaggtcgtctctccaatcgccatatgggccacttagcctagcgtcctcaattagaaactgcctgctcaggagaaaatatagtcaactcactcaaacgaagactgattgagagatggagtagtggtagtgacagtggtcatggctgtttctccaaacagaacaagctttagtctgaacaggaatgtacaaaataacgggagcgtagctttaagtatgcgagattaatatcccaatgtgatacatcatcaatttaaagccagcacatgtggaaattcgcaatatgaagtccaatctgatggcctccttcggcgggtaagcgggtcgaccccgccaaagtcgcaagagcggaggtctcgcagacggtctaatcgccatcccacctcattctgagccaatcagccatgcaaatgaaatcaacagaaacgtcacgggttgggctcaaaagactccaaggatgacgtctcaaactatttctccacacaaatatgcctattatgtcgcggtcgctctatactcgggcccgctcaaggttgaaaaattctctaatcaaaggggtttgcccaggtgaacaaggccaaggtcaagtctcgaagcacttgcatatagaaatcgccagtaacacatcgaaataggccatgtagacggtttgcgctacaaatgcagcaaccaaaagaggcagtaaccaaaagaggcctcatgcagaagaaaacagatcccggatatattatccagtgggtcactaaccactactctcttttctgcttccatgccaatctaaatccaagccacgggacactgaaagctttctctagggtatattgcgagcagtgacccatctaatgcttacaaatctccagactcaaacacaggttcgttatgcttcacagacctgacactgcgttcttaagctcaagtatgtaggcttctgcctcttccatactcgttgggccgactacatcttgattcggtgcatccggcgagtttgctgaacctgtgaagtacacgattcataatcttcaatgtgatgttttgctgcctcgattgtaaggccactaatatcagcatctcgcaatttccgtctgcataaattggactccctccatctgaagaagaatgtccgctagctatcgcctctatccgagaagtcatggctctatgcaccaacagtacacgggaacgtatcctggctggtctcggctcttccacttcgactgtcgatttctcccagcgacccctgctgaatgtcagtgaccatccaaccgcccaacagcccccctcgaaacataagcacgcgtaatgtttggcccaggtgtggatgcgtggccgtggaattggcttcctcggcaagtgcttggctcctacctctgcttagccatgaggaattgcaaagactgtgtcagggcttggttttagactgtgagctgtcaatatattgctgaatccgtgtttggttgatggataatactcccttcatcaccaaggttgcaaatgccgaaatgagatgcaggcttgcagcgccaatatagaatagctcaagatggctggcaattgtcaacatcctccagcggaatctctctctttctcccgcataccagatatgattcattgttaccgtgtttctaaccttggcgcctgtccctcattggcatcggtcacgatataactcgtacagtgctgaacaatcccatatgtccaatgactggggtggtgtgctagttgaagagagggacgaacaggatgttcttccaaatctgattgtaatggcatttattcttgtatgccactacctgtatatcatatgatataggaccatcagggaaggtgcgatggagagtgtctattttgggaaggcacgtgggttgggaatataaaagggcccctccccccatttctcttcttctcttcttcctctctcctccacatctctctagccaccatctcaccgtagcccccacgagacagcgtcggcagaggatgccgtagcacatgctgcttcatctaccacagggaccatgacattaccatatgcacgaggtccatgtaggtctgcatcaaacatcaaactgggctttctcgtggacgttcctgaagtcgtggctctcattaccacttgacgagtcccacggaatacattaggggtgtaaatcttcgtagccgagactcgaaggtagtcacggcaatgaccgacgcttccaaccttacggtttcttttttgtgtatctaacagaccgacgatgaaggttgtaccattctccattgtttccccatgccactaccccagttgcactacccgtcgtcgcgccgtcgctcagctcggcgttactgttcttcccaacaccatcatcagtcgaagggtcgcgcatcttatcgatcaaaatctccatatagccacaactcggtcactctcactatgaatgcggaggatcgtgtgttgccagactctacctctgatcctattatcgattctatggagctggtgacttggaaagtgatagtctgctgggttggattgctattgctgtcaatactacataacccctgttaacatggctctctttttaggcccagcagcgaaagaaatgattgtgtacgctccagacctaacacctgcgctactgagactggcgacggcgcgtccaacaattagggccggcgagttcggggcgaacaacccattctctccatcccaattcccttccaaacagtctatatcgatttcgtcaccggcctgccagtctcccaccagagcttcaacccagtcgccttcattacatacaaattcacgaaacggctcagagcaatgaccggcaagaccacttggtcaagtaaggactgggccctggacgctcgcatacctacagatcgcagaactccttttctgtatctgcctcgacagtcggtgatgcgcacagtttccttccatgatccgggaacggtgccacacagagtatgattgatgccgtctctctggcagcttgtttgcagaatgctgggaaagagaatgtgccctgggcaactcgtgttcataacaagcttagatcggccactatctggcatggcaaagatatgtctaaggtaccatgacaagatactcatccatcaaaatcaacttgtgtgtacggagtacacgatcaatgaacgaatatgatacttgtatgatacatgtgagtataaggggtgttgctattcggaccgacctgcaaaccccggccagggtgacgatcgcggacttcggacttacagtgtaaactccgaaatcagccctagagtgccccgagcttattggacttaagatgcaagtcttaatggccacattccatggtcacgttgacggaagccgctatttcccagaccagtctttttggcattcttctaaaacaaggcacactgattgtattggggtcgcgttcccccagcagacggagccttacctccagctagagcgatacgtcaaccaaatatctccattaacgactcccctgccggaggccaacaagcgcgagacgagcccaaaagcaacacattatctcgagcctggaaaggaaagcaggacgtcaactttaacgaacagtccactaggacatcttcgatttgcacgacacgccgaaagtcagaagtacgagaatctttcgagtcgagcatatttttaaaggggcttgaatggaagctattattttgttcagtcacgaaataatctcaaaggaggacaaggcctgtaacgagactctgctgccgcaatttcagcgctgcaatgattgtatgtcccgtcccgtctttcgtctcagagtcggagcgatgtgggccgagtacgtgtcagaatatcaccactgtttgctgtcccctcgggtgtgagtctagttttggcatagatcgaccacatggctattgccgctatgccacctcgtaaatgttaacacaggtcacaagtaactagctaggtaggtatatacagataggctcaatatctatactgactgaatgatttaatgcgtattctaaactgtggacaatacaatctaacgttctttctctctactttgtagcacctgtgaacgaagttaattcgtatccgtgtcaggtggatcgggaaaaccaagcagaaaaagaagaaccaaacttacctaggaacttcttgatatcgccatatatggcgaattggcccgcagtgaggccaccaaccatgaacagacgcgtcgggagaccagcaaaagatccacgcagacccagctcaccagcaatcttgatcagccgagagacagtactctcaccaggcagacccttcgtcttgttgatcttagacaacatggtatcagcgggctgagacacgatggcagccgcgaaaccgctcagcagaccagatcccaaattcacagcggtcgaggcaccagctgacatttgagacttgtcaaattggctcaggatggcctctgaaatcttttcgaaagcgacgaacttggttattgtgtaaggaaccctatacatatgttagttgtagcttttcgtcatgttgttttcaccaaactataagggagtcttggatcgaatgaacgtactgcttgaaaaggataggaccaaagcccgagtaaagagcgccgacaccctcattcttcacgatcttcccgaaaccatcgatcagaccattagcaaagccgggtgtcgagacaaggcgaatacgtgttgcttccaggggacacagcgcaaccgaggcgaagaactcagcgcaaccagctgaaacaacgtaaacagcagtgttattctgcttggccttttccgcaccgagaacatcgatagatttctgctggaagaattcataaccgccgaatttgaaggcgccttgcatgaaatatcctgcaaaggtcggcccgaagcccgttgcaagaacgctgatgccttcattacggatgacctgtcggaaactaccaatcataccacggttgtaggtgagagggtcgagctggatccttgtcttaacactatgcggaaattcttcattttagtcgatgttggtgatggagctgaagctagagctggagtgagaagcaattgagagcacgtacacgtcgaccggagtaaaggcaccatgggtgacggagcagcccagtgcaccggcaagggcaaagcgagcatagaggttgatgccctccggcttgctattcgtgagctggggtgtggaaacaggagtggcagccattgtgatggtcgtgataatgaatgcgtggattaagcgaccagaagggtcttaggattatatataaaatgataatggcgggccacttgtccgcaagcctttgttatccctacctactgtctcgggtttaacgctattaaccccgttatttccagatgtccaatgctaagccgaccaccaatatcagttgcaaccttccttctcgcatacttgcagtaagatgacttgtttcttgttgtaactgatttttcacgcatcctttttctgttctctatctaggtacgcattatctcttcgcatttattaggtatctatcgtgctctgtactccgtaccctttataggtttagcgagacgtaaaccccgtctgattgcttcggcatagaggtatctacctcacaattttcatgccaatttcagttagcagatgtaggctgcggtaggccatgtcatcgaggcagccctgggggagtttcccaggcgctgggtcgcttctgcaaggttacgggccgtgccggtagacccgcagcagtgggtggggcagcccgatatcattgttgtcggtactcgagtttatggcaaatgcatatggccactatcaagtcaatagcaatccctcattttgagagagagagttcctttgcctcaaaccatttcatgtacttttcttttcccttcattatatatcccttcttcaacacttccattcacatcttccaactcattccgtcatctttggcctcgtctcactcttaaattacattcattgattgctatatattgggatcacttgaccttgtctatcaagactaccatatcttcctttctacctgtctatggtattgctcgctctttctttatcactatgatatgaacagaattccatgctgtcacaagcttagcttagtcatagcttcgtagcttccagcacccccaccaaggaggtcaagcttactgctacatttctggtagcaggtccaaccacggtagtcagcgacaacgccagaccaccacacaagccgaggcgcaacctaacaacgcaatcagcatcagctcttccttaccgtcttctttaccgggcactcctgaggcacaaagccaagttcacggagcggtagcgcaaaaccaggttcaccaagccgatagcgagggaaaaatcccccgggattttgtcgtcccctacaaaagcattatggaaaacctggaccgcatagggccagaaatcgacgatttgagacggctatacaagcacatgtctacatactgccagctccaacttcaatagactgccctaacggaaaaaattgaagccgttgccgccgccacacgcattacaatctctaaagagctcaacaagctgcccgatattcaggaccgagctatggaatgctgggaacaccttttccacctgcctttcaaagctggaactccgcattttccctcccaagctgaaaccccgcaagactataaagatcaagatgagatagcgtcagtcatcaaggagaagtcaccacaagcctcagcggaaacttctagattgctcaaaactatcaaattacagttccatattaatcaggactcagcaagcatgaaattacttattggcaatgtactacgagaatcagagtggagacgattcaagtaacctactcggaatccctagtttctgccttgaggcttgaagaatcagtacatattacatgcaaaacctatttttcttcaatagatgatacgttaatctctatgctctcatctttattcaattttgtttgttattccctcaatacttgcttgctttagctacacttccatcttcgtctgcaatgacccaactactcactggcttctcatgtttgaatctgattgaggctattgcagctattgaccctattgacaataatattgtataaaatcactttcacctctcatgtacctccatttttatcagctcgctcatttattgttcaattgcaatatcttcctcgagacaccatgcctattcataatgtggccattcaatcgaagaactgtataaattccatgaagctcctgaccaacctatttttttcttcttctctatcatcaacgatgaccccaactcgctctcgacgaactattcgcccgcactggccgcctggcatcaccaagaaaaacgccgctcagcgaatcttcaacataccagagctggtctctgagactgtccactggcaggtccagggacttgacgacttcatgtacaaagtcgcggggcatcgggggaaagaagcagtgggtgtggctagcgaaattccggccatggaaaattggcctgggtgccaagtgggagccctatgtggagggccaggcgggttatctctatagatttgcgactcttaaccgagcgttgtatacaaagataatccaacgtcaacgaacctggaaaaacactatgggtgcgatggatacgccggccgtgtctcgctcactagacgtgatcttcgcgaaggtcccggccggattccgcccaacagtacgctaaccatgtcaagctggcctcgttggtcaccgtcaacaccggggatgtccgtgttgctgacgccgcgctgagggatgttcgtttcccgaagctgcgggtattgaaattgtgcgttcgagggagcagtcgcgattctgacattcggacccttatgggtcgccttaatatcccacgaatctagggcgaattagtcactgtcctctccctcagcagctatggcagaagggagccagaatggagatggcctctccacggattgcccgaagattgggcaaaattgttcagacggatctcggtatgcttctgccaccgctgttacgataaaccgctttgtactgattctttatcataggttctctttctaaatctcgagaaagtcgagatcggacacaacgtccttgtcgccgataaggttgtcaagaacttcgctcgtcggtacccagcccctaaggacccttgagcggcgctcactcgagcgttcaattatggcctttgacctcttcggcgaggcttcttgagtctgagatcgctgcgcttggggctttccgagggtgcgttgcaacgacccttgctccggcaaataattgtggaattaggggaggatggatagggacacaattatatggtataaggtccctaaccaggttgaggacagtctcgagcatgaagcaattgatggctttacctacaaagggagctgacgcgatatgaggacctcatattcgtttaattgctggcttccctggtcttggaaagcacgctcttctgcaaactgtggatgccgtctgagtaaatagactcgtccaacacaaactcgagccacaaattctgacgggagaaacgatgaatgtttcgattgagccagtcgcggggttcaggagaaacccccaacaccgtcccgagcagccacctgcattcttcgctgagtctcattttacaccatcggctactccgcaatcactctcatcgagtgatccagctttctcctattcaagctgtcatggagttgacagagtgctgattgatttcaaattataatcagccgagatcagacaagaacaaaagcggcttattgacaagcaatctgcgaatacggacctcatctaccccgtcgctaagtacccggatctatgaacatcttcgtggcgatttgatgacctttctttcccctgagctaccagtgtaccacatttgttcgaactgaactggcatgtaacaatcttcacgggaactaagtagtaagaggacctttcttcaagtcattgcaccgttgataaccggcagtgtcatccgtatagccctgcacacctaggctacattcaatatagcttagtctgaatggaccatactcccactttttctatccagaatatctaataaaattcaatttacaaataagagggacataaaccccatagagaggagatatccccacatgtagtatatatacttttccaacgccgagtagcacaggatataacctgctttagctctaaagtgaaacacctcaaacccaggcctagggataaaaaaccaacaccgctctttggtatgccaaactcctttgtatcatgacgccagaatgcgaaggacaaccgtcttaaatctcctgcgagtccaacgcccacacctcccaatgctgtagaacctcccatcctacccgtcgcgcgcgccgtttccacacaaagccatcatcagtaaaggtgtgcgggtagcagccgtagaccggaacaccctcgttgtcttcggctctgttgggtgtcctcgggcagggtggcggtctgtgagtttcgcagccatctagatcgcgtgatcgtttccctaatgttgatggcggtaggattggtcttgtgccgggtgacttcgaccaagaagagatatgtgttgtttgtgtatcgggcgacttatgggagacggcaggctgatacggtgcgctgggtccaatgccgtcggtaccttgcgtgggagcggaactgtctgtggtggtctctggggatgcattatcaccgtttggtgtttgagactctttattggttcctaatggtattggggctttgtagaagtccttcaactcccaggctttccagcccatgctgataatcttcacgtttccgtaaacttgcttgttggcaaggtcgtagctcaacatttcggtcaggatcgagtcgtcgatgtccaccacttctgcaaaagtcttggcattcgcgaaagtttcttgcaccattttaatgctatcaaatcgggcagatgggtatatcttcagtgcagaagttgcaggaccacctgacgcctgcccggtaggtgggggtatgagaagccggatcgctttcaacttccggaggaaaggtattagtagacccaatgagtccatactagaaaactcggtggcaagggcaagctgctccaaattcggacagctatggacgagtcgcgcgaccatcccggtggagagaggccatttagatggaagaaggagatggcgcaatgtcgcgccgtgatttgtggtaatatttgagaggtagatgtctcgcatactagctatagcattaagctggctagctggagaagcagaagtaataggggagttggctgtggttccgccgggcgcaccagacgaatgatgttcggatactggcggtgtgagcgccgatgagaccacccctcctccgggccgtgggcaattgaggatgtcgcttgattcggatgtgacattgacaaagtatagccgttcgagtccagagaaattcccaatgaactccgcgctccgctttgacactgcatccatccggatggatttcatgcggagcttggcatgaggcgggactgtcggccagctgttctcgacgaatgtgttgaccagacttgagccatcaaggccactgagaaatgtgacgtcttcgacagtagtcggatcaaaagcccagttgaactcttcggtgtggaaggcatatagattctggaacgtcatcttcttaaccgccagtggctgcttgcttgcgatcagcttgcggaagtaatcatgcagagagacactaggctcgtgtgcatcgcgcatccgtggcgaccaatgtagtttcaattcgcgcagtttcctactcttataaagaagagtcgagatatcatcggggtagcatagcgggtcgatatcggtgattttgagacatcgcaaatgcggcatgccgggaatgacgaaagtgggttgtgggtgacgactggacgggaaccggatagtcagagacgtgagcttcggcagctgtgtcaaccccagaaaaaccgtgtcgagcattttggtgttcaattcccaatggaagctttccaaattagtcatgcgatctatggcagcgcgtgcggcgatgttcagcaacatcgatgcgtcgggcacccggccgacttgggcatgctcctccagctcgtattccttccattcaccccgtagtgtcatcgatcgtaccagcgtcgcataagatcgtgtaataatggcattcaatcccatcgtgaagggactagcgctcccgattccttctggttgttcgtcgcgataacggattttgtcgtaggaggtcagcgtcaggctgcggtacagctgtggcagcgccatataattgaggactcgacatgttcgacatagccgggcgagatcgcctgtgtcgtcgacctaacaacagcatgtcagatatggaaatgagatgtgcggagttatctctcacatgtgacacaatctccgcaatgaggttcaacggcagagccatcaactgggcaccgccaggcggttcagttatgctcgctccgaacatgtttcgattgacggtcgccatgatgcgacgtccaaggtaaggtgtcacatagagatacaaagaatgcagggaaatgcaccggaatcgcgagttcccgagtgaaatttcgtctccactttcgtaagccagcccttggtcagccagcagccaagcagagatcagcgatagtcaccactaccaccactacaagcctgtagagagtatcaactatgagaggactaagtatggatgcaatattatattcaatttcaaaattataatgggtatctttctaagatgtcgaacggaatcctcccaacaccttgccgataatatcaaatccataaactccgtgaaatggccaaatataactgcctagaacaccaagaaatcgtcccgggcctagctcctcagcctccattcggcccctgaatccgtcggccacacgcgatgccgtaaaatggcgttttatggagaactttggccatgctggccgtttgaaggcccgtgcacaagggactcggatgtcccagtctgttccgctgacacatcgttcctttcttccgagtaactcgtatctgtccagctttgttggtcgtaatttgtgacaagttcacgatccaaatggctgatatcctcgttgatcagcgccgcagcttctgggtcgtagtgtaggacatagtctccacctcctcgctctacatctgcctccgtccatggagcagacgcttctggtcgagaaggaatcacccgcacaggcagattgggacgagtggagggcgctccgtgatgttgaggttctatcggccggctctctcccggtggctgggtgtcctccagcaggcggttttgcggggaccatgtgtgctggccgcggcgacgcgctggaataacagtgactggtaatgagccgtcggtgttttgtggtccagcgcctggtcgggctttgcgatggagagaaaagaagagatcggctcgagaccgggcagcttttgcttctgcctcggcctcttctgctgcagcagatggtctgtgttctgagaattcttcctcggcttgtgcatacgccacttctttgggcagagatgcacgtcgcctcttgaatgggtgcaggagaacatgccatcgtggatcggcttgcacgatctgcggggattgttctcgggtattttgaacggaaagagcttgattatggatacccggagtatgtggctccctgccttcgagttccttggcttcgtccatttcctcctcctcgtgcatatttggcattgcgaccggaggcgtagggctagccactggatgatatcggacattgtacactgtgcttgctgcactggtagtatcagcacggctgatcggtgtgatcgccgctgggggtggagtaggccggtgaccgtttgggccccgcggcgccgacgcagcggcttggctatatggtggtgctctggctcttttgtttcgattgccaagaggcaatccagcccgagcccgtagaggtcgatgggctaaacccatcacgccgccccatcctgacgatgcgccattgccgccaccttggtcgtgtccttgtggggagaatcgcggccagtcaacttcctcggatggagtgacttcaagcatttcatcgccatcaaaaacctctcgtccaagaatcccatccttggtttcatctcgttccagcgcttcaatacgttctacccattcccagaccaccacactggccgctgcagagccaacccatcgaatataggtaccccagccagcaacttcaggcttggcaatatccaaaacaaaaaagacaacaggtatcaaaatggcgcatagcgagagaagagccactaagcagatattccgcatcttggggtggaaaaatgcgtatcggtgcttggatatcgagtagaaaatcacccaagcggcatagagaaggttaagcgacaattcgaacaagtagctcagagcaggaatggcatcctcgtatagcctgggtcgtgtcggagcgttcctcgcccaaaaattgtccaaaatactaaaagtcgtatccagcacaatcaacgcaaacccagcccatttgatcataactttttccttatgtcgcgggaacaatcgaatcaacgtctgaacctgcgcaagccacagaaatgtactcgatatgacgcgcacgatgcgaatttccatgccgtcgataacctcctgggaaagcgcctcggcatcggaaaacccatagttatactgccgctcggcgactcggaaagaatccaccgtggcgatagtcagcgagatcgcaaccaagatcgcagccactttctgtagccacggtcgtccgccgactccaaccaccgacgagttcccgctatatgagccgctgatcatcccatggcggccgaggaagttggcgccgccgccggggccgccgacgtaaaacgtgcgtggcgtgatgagaaggattatgacgaggagatagctcacgacagtcgcacaaccgatggcatatagctgtggggtaatggaggaataaaatggatcgcgcgtatcgagaacggcggagatgtgaacctcatcggttggggagccagtgcagacaggctcgaagacggcattttcactgagggtaatagcgaatgacttattaagataaacgagtcctataaagaattcgcacctcgtaattagatatgattctagaaggggcgttccaaacaccaagtctgcgaccggcaaactgcagcctgcggcccaaggaccaaagtgtcgatgaagataggagattacataccattgataggcaagacgacaggcgtacagcccggcgtataaaccttcgtcgtagtcggtgttggattcgcccagatctggcggggaagcaagtggaagtcattttccatgatgtgactcgatgtgaacggcctcgaatcgccgtcacaggaaacagttcataaaccgcgcaatttccaccgatacgcccttgtcgtagacccttcactggttaaactcccattattgactctgatcgcgtacagacggtgcgaatccaaaatccggggggggggcgattctggaagggaactggagaaacagcaacggcggtgtgagagtcgggggacacgagacgagcaatgttttctttctgtcctactccgagaaaagaatgaaggtcgtaagatcataaaggagataaatctacaaggagacaaggaattaaggaattaaggtgaaagtctggatgctccgcccatttctcggctccgcattggctcctccacaaattcctcacgcttatcgccacaccgttgatgttgggtctactccgtacactcttctatatctcacggtttcaccaatatatgcatgcccattgtattgatatgtataagcttagctgagtcaagggccaaatttcactatgttgactgatcgaatccaacatatctatcatccatgtatcacatcgctcttcgctgtacaacattatcacacataagaatcgccgatattccatgggtaccatctcatcaagagatttattccatttatgcctgggcagcgaagccaagacgaggtccctcggagtcgaaaacgacgtactggctcttgaggaagatatcaccgaagatggagaagccaatgccagagttgctctggataccaccgtagcagctggagctaccggtagagacaggtgcgaagttgatgtacttgccgggaacaacggcatcgtagccattgatggtcacagtgaagtcaggcagagtggcgctgcaagggaagatataaccaccagcagagctgctgttctgggagccggtaaccttcttgtagtaggcggtgacaatagagctatcgagcaggaggagagtggtaccggtatctatacaattcaagagattagtcatggtaaacaaagcatggatgtccacaagggagaatgtaactcaccagcaattccggtaatagacttgccagcagcaccagtgccgatcttgtagctgtcggcagtgaaggaccagaaaccatcggagtcatcaacgtcggcgtaggccaaagttccggtgtacttatccgagtcgatgtagccgaagtcgtaggtgccaggggcgccgtgcttgagagtcacggcgaacagaggctcgccaaggctagacttgacggtgtcgaagaaggtcttctggggggtagggctgacggtgttgatggagctgaaagccagacccagcagaccatcgttgttcttgtcctgcaggaactgcgagctgatcttcttggcagcctcaacagcttggccagtggccttgactccaccaacagtgacggtgtccttgtagacatcaccgctagcactgctgccatcgccgtatgaaatggaccagctagcaccggacagcttagtgccggagctgccaacgttgtagacgtcgtggccggactgctgcgaagaggtaagctcgctagagaagacccagctatatgaattgtcagttgttgcccttgctagtcatgccatatcaaccaacttacaggtcagcagagccagtgtcgaagtccaagttcaaggtagagctgccaatggtgactggagtgagatactcaacgtcgtcggcctcgggcgtggtaatggcggaaccgctcacggcagcagcgtgaactgtggccggcacagtagcaccatacttgaccagtgcattggcgtacagaccaggcaagttgacagtcctggtaccgggaacagccttctgcacctggttcacagtgaagcccttgcgggggctcttgaccggcacagccgcagctgaagcaatggccgagaagcaggtgagagcgacggtaacttggctgaagacaaccatcgtgatagttctatagaagaatgaatagatctattgtgaacgaagacgatgctggagaggatggatttcataaagagatggaggcaagacctcctttatagctttcctgatggatgaaatccgccggcgtccgagtagaaggcatcaacggggctgtctatcgcaacatccaggacaaggtgataatacccttgtaggaaggaaacatgacgatcctgcagaatccagtcaagtcgaagagaaacttcgagatcgtcacggataccatcggccatccaggagcacgacggagtccgccaagtaggcgattgaggggtcaagccaaaaagggacatagtgccagggtctcaagaagctaagatggtatcaaatggacgtaagaggattagcgcggccagcgcacaggggcgggagatgtatgagatgcaacacaagcaaaatgcccagggagcttggttgtaacaagctatctaagcagaacggagaagtccggccaggccaaggcgttgtcttgagagactgcgtctggatacatcattgggtgaagactggtcgatcgccatacttggccatccttgtgtaagaggacaataggttgccattggctcaagccgatagccagactacttggattgtctttcggctatgttgtagtcacgctgcatcgagggattgttcagagacgctggagactagagccctgacgatcatcgcccgttatctccacgacagccaatcacctgcgcgaaaggccaaaactaggtcacatcgctccattagggtaatttggcctcattggatgagagacattctgcgtatgagccttttgggtttaacctagtgcctagtaaggccatactagctctcaatgaaacaagaacagttataatctccgacggggatccgtccctgcattgtatgctccaccaatccttatacagaacatcaacatggggtccacgatgccagaccgatgtgacccttcacggagagagaccaaatagcggctcttatctgcatcgaaggcatcgaaggatctagcggccgtcgagatggcgatctgctcatgggatcggcgagtaagatagtagaccctacgtactcggcagggataattgagtgccgtgcatgccatcaatcgcattgtttgtagtctatgaggtgactcttatggtaatgtattactctcgacctgactgtaatgaaatacggcaatagttactatatttacattgttctcaagcttaacccatctcgtatcaccattataaggccaaagccacccgaaagcttcaacctccgcggcccaagaaacttttaaaatatcatgtgaaagtcaggagaataaaagtacttgatttctgcatgaaactagagaccccgcaatcgaataaccccccgacggacaccgccggggaggtatagggattcgcaataatcaatgatgggctgcagtaatagcaccatcggcagaagaatcggttgatgcaaattacggcaaatggtgtagacaagaaataagaaacgccgggtggaaaactcaggggtatataatttcaagcaaaataatagaaaaaggtacagaccatgagctagatcccgaaaaagactcccatattaaagtgtaagactaaaaagaataccaaattgttcgtcatcatcattattttcatcacaggtactgggacgataacccggccccagtctcaccctcgccgttggtgtttccatcatacccctcattgaggagtacctcgagcatgtcaaactcgccaagcatgggtcccgtcccaccaaggccctggtcaacaattccggtggagctgttgaagaattgatcaagaggcaaggcaaaccaatccggaagcgcgccggaggtagagtggtggctgtcccccataggctgtgatgaggggacatggtttggcgatgatcggtccatatcattggcagggaatgtcgagctggattcgtagtagttgtggtacacggacggcggaggcggcatgaaggatacgttgaggttggatgagttgatcggctgggcaggaatgttcgccagtgggtcatttcctgacaccatcggggggccggtgccaggagtatccacatatcctaggcccgacccgcctgacgtcgtatcatgaccctggttagcggaccagggtgtattcgggccctcacgacgagtcgttgagtgatcgcgcgatggtgaatgaggccgagagcctgagactgaggtacgatcatgtccgtctccgtctgcgccgcggtcatgcggtgcaaagcgcagaaagcgcgtccgaatgctgctagtgagaagctcgagaagccgggctaccgtgttgctgaggtgcacgtcatccacaacataattgcgcagtgcctctaccgtccggtcctgcaggtctagagagactcgcacgtcgtcttctctggcacctagagtgaaagtctatggtcaagattagtattatgcttgccggggtttccactagagaccataccttcaagatgaagatcattccagacaagattcggaaaaacgttcgaatgggtgcgtgtctgagacgaccttcagggacaaggccttccaatactgtttgcaggattttgcgcgacgaatcaatgacttcctggatataatgctcattaacacggtagagctcgttcaacgtttggaaccagctgctgctgctgttagacggccccgatcctggttggccattctgggtctggttatgagtctgggtggattcgttggacatggtagtccatcgatcaacgaccgcttgtagagcgagggaatttatatagagacctgcttccatgtcagctgttatccttcaacgaatcaggctgtcaacttacgggtgtactcgagctcaatcagcaaaacgctccgcattgctggtgagacttctttctgttagctttcttatccatattcaacggccaattgacttacgagtcacactgtccagctgctgctggaaatctcgtagataaggttggaagcggtcgatctgctcacgatatctcccactcctgatcagatccatcgtctggtcactagatgcaaacagcaaatgattggcttgatagacaattttcgaaatgctaatccagcaatcctgcatccgatcaagattggcatcagcatcatttgcatcagcggatgtcggcgtgatatcctgcccccattgaggcaatgggagcatagaggggatcccaagacgtccactactatgcgtaataaacacaagaatcaaacgccgtagtcgacgtttccgtgtttgctcggatagcgactcattagccgccttggcatctcccttcgggtcgaagacaccaagttcaaaagctagagcttgcgccgtactcagtagcatccatgacatccgatccgatcgccaggccggttccagccatttttgaaacgcgacccttccctctgagcctttgctattattctcgccgtcgttgtcctggtggtcggcctgactgtatatctggggatctgtatccaaaagagaattttcatcgtcgcccggtggaaagtgtaggtttcgtgggtgccactctgtaagaagaagcatagcttctatagtgcccagcgacctcaattgcccacccatactacctttgcttgacgttgatgaactcgaatcaagtgatcgagatcggccaatgcccgaggtcccagcgtcaaatttctcttggccccagaataggcgttctaccatgctgcgtagatatgcccagagacgatcatggatatagaatgcccgcgtattggcaccctcacccttgggtttcagatgcctagatgcgatagtgagaattgtaaccgccagcactggctcatcggtaagcaacgtgcggtgtgtagaaggatgagaaaaatcagggattacaacagggctcatcggcgcgaggtgttcatagtaatacgccacatagtccatgccttcctccactgtaagccaaccggcacggacgaatcgcaatcgtgaccaggctcggattgcgtccagatatgtcggctctgggggagggttgttgactgggctttccctttgggggccgggatccgcgatctggggatctaccggccctgaagcaccacccgggtagtatgttgacccgcccatagacattcctgatcgaggtgtccgcacaaaggacccacccaaacttcgaggtgaactaccttgtggtagaggtgaaggccccgagttaaaggacgagacagactgtcgtgcagcaagccgattttcgaggctctggcggttgagatcctctgtcctgcctgcagcttcagagagaagatgcagagcgtcgtgggtgtttgtaattgccggtgacagcaactctactgctgtgcgattcatcatcggaggccctccatagctaggtggtgcaggccgttcgatgccaggatatataggaggtcgtgttgttggcacactgggcatgtaacgcggagttggaggtgctggaggcgcatgtggcgcatgaagtgcatgaggtgcagaaggtgcctcggaccatctctgttgggcaagcacggcttcacggtcgaactgaggtgtatcggaaggcgcaaatggcggaccttgactttcattcttggccacctccccaatcatcattcgcttgtcgcgatggaggattgccgctgcctccaattcatcttcctcggcatcggaggtcttgcgctttcgacgcgttgccgaaaattcacatcgtttactttcgcgacgacatcgaacacagggtggggggcgaggattatcgacacctattttttttgtggtcagtccgaccgcagaatgaaaaggaatgggagtccatacttcctagatcacacttgaccttgcgtttgcgacatggatcacaagcctgatatcctcggcgatggtgtgcatcagactccgccttgctgtacacactattattgtcccccatttcgtggatcgcaatcatggggaaggctccgacacaaagcgatggaaagcgagaataagccttaaaaaggcggtgggggtgttcttactccgacgactcggactaaaacagtgggcacagagtcttggaaagacaatagaagatgaaattgcacttgaaattgccaaaggagatctcttggtcgaaatatcaattgaagtcagagtttgctcgcagtcactggacctggtagtttccattgtataatgagaactctgcggggtaagacacggaattccagaataccacctacatatgtacagatatatatatgcacatgtacatctcattactttgaaaagtagatcctattctaattcagaaatgcgacaattcaaccccgacgttcaagatgtaaatgcacaatgcttctaaaccgagaagaaaaaggagcaggggaatgccacaggctaaagttggtggcaattccacttgaacggtatattcaaccctccacaattcattctctgttctctgtactagaaaaaaaaacctgtctatttcacccgctgtgaggcgaggctaacgttcatccgggacattgactcccaagctttgcgtggcggcaccagctcaccagatgcaccactgtccacgctgccacgacgtgagagatcaggcggggaccgcccagcaacgagagctctaacaccaccagcttttcgggcggggatcaccgagtcgccagaagtaagaacgtaaagaaggtacttgagattcggaagagtgtgtcggatatccaagacgcgcagtccttgtttgatgaggatgtattcaatgtctttgttgagcaagaagaccgcgtactcgaatcgatactggacactcaccggatagagggggtaggtgcgctgtgggagtgatgcagagatggggtcttgtatgaatgatgttgacccgttcgcgttgatcgagtatgggagatgcaccgacagatagaatgagagcagatagaccaagtgagctgtgtgtcccaatgccgctgcgactacctcacggtcgatatcctcgaaagtcgagtttgggagggccagcccggcgatggtaaatgccaagggttcatcggggatgggctcaatggggtagatcgtgagaagatcttcagcaatacgtcggacctggcccttggtatcctccccattttgctcgagcaattgctcgctggaaactaacctctcctgagcctcgggaagatgaccgcgtgtcttttcctgagtactacggccttgttccatcgcttcttttcgggctttgatactggcaatgagctcttctttgcgcctgactgcggtgcggactcgtttgcgctccatggcgacataatgcttggtaagagcaagcttttcctgtgccgcagctgcatcactcgctacattcaatgagcgctcattctgctgtaggattgagctaatctgagcctccaatttttccctggttgccagtgcatcctgtacacattcgtccaaattggccaatctcatcaaagcgtcataggacgaggatggtaagacagtaccctctgcagtggccctctgtcctgcagcttggagcgatgtttcgaccggcggaaggtcagtgagattggaatagacaccgtctgggaagtgaaaaaggatcgagttcgcaggaagtggttggtggaagctctccaatgttttccccaaaaactgcagcgatcgcaaatgcaactgtagttcaactaatagaataaacccagacatgtccccggtctttgcccagagtctcagagtcaattcgtccattcgagagatatatgggccacacagattcaagtcgaaaaatcggaaactcggattgtttgcacggtcgaccgtctcgctaatatagaccggcttgttaagaccatcacaatgaagtgagaagaatgtgtccgccatacggctattggtgatatcttcgagtctgacctgccgaatttgaggattggggtcgttccagaacagggtacttctgcgacgcatagaaggcatcgcaggctcctttgcattgtcatgttgactggaatgcgacttgagatcagtgaaggatcgagagggttgcaaagtgcggtttgtgctctgcgataggatcttcgacggcgtctttaaggtatttgggatatcgtcgtcatcaatggttttgccgtgagctcgagccgggggaggcgtcacaactaagttgcgtatagagattccctggagatgccgaagcctacggttctaatagtttgtcaggatctagcaccgacgtgttctcttccattctccatacatacccatgcatagagccatggcctctctctgcgggcacctatatcctgctccgtgtcctcatccataacgccagcgctgcgggagagcgcggtggtttaagtagtgcgttgctaataaatcaagtcactcatattaaagacaacagtaacaggcaaattgcagtttgaagcaattgaattggcgaaagagagaatagtgagctgataagagatgatgcggagagcaagcgccaagacctcagcgttccccgtcaaaaaatcgacctcccgtctctctcgatcaacaccgtctggcgcctcccaccaatgcaataaagccgcacttctcactgccccgattcttcccagatcgactgtacgcagcctccggttcggccgcaatggcctccaacgcaaagtctttccaaaaggtgctggatgcaacagcacttgcggccacgaaattcatccgccggccaccgattgatccgaaattaccaattcaaggaaagccccgagtaccgggctcaaatgcattcaaagatcaccaggaaaaggagggtcgacggttacagaaggccttgaattccgtcagccacggcaagaacatcttcgtgtacaacaacatccgcacgaaacaggttgtatactcattgactcgctacctggaggtgagtttcttttcccctactggcacgggctttgaaagctccggtctctcgcgaaaccctctatgctgtcctatccttccagtccgccgtatcgcaattttctaacttttgggacctttagaaaaacaacctcctcaagcaatgtgtcaaccacggcaaaaagaccattcccgccacagtccgcaaggatatgtgggtgccatacttctctgtgcacttcaacgaggcacaagtcggactgaacgtctataaccacctgcggcaattcgcgttgctgcgccagctctccccgcccaaggaaatgatcaccgtgacacaagaatatctcgattcgaagcggccggtagacctaagggaccagaagcaatgggacaaggaaaacatgggaagagtgggccagatcatgatgaagaaggagcgtgcttacgccctgatgaaccagaaggccaccgcgattgccgacattgctttcgttctgcagaagcaccgagaccatatcgtggagggtgtgccggagagctccaagtccggatacaagactctcaaggcccgtaggcgcagacgtgcggctctcctgcaggaggccgcgcaggctaaggaacgtgcgggtgaggttgcatcgctcgaggagcagctgcaggttcagattagcgcggaccacaacgcgccacaggagaagtctgttaagatcttgtggcaggatacgtacgatgcgcagtttgcgaagaactggcccgattacattgagcacggtcagctgcgctggactcgtaaccacatgattggccaggaggaccttccagtccctagcgaggacatcatcgccgatggttcgtttgagcaggcgtagacgtttggtgtcattgacgttcttcttctctcctgtccgtcgcagaccaagacgagacgttttgtgtgtgttgatatccatttccctctggctttggtctgatggttggtgctttttgtattttctctcttgtctctctgtctagcttatcctagcatccataaattgtacttttagatatatcaaatcacaagaagatatggccaccttccaagtgctgtcttcttttgacatcttttctagcgtcctgttaagtgcgatctctttcgtttttttctttgtatcatcttcgttctctagatgaacggtggaaaagatattataatgcacaaggcctcaagtttaaacgactaactagggcgttctaaatcaaaatccttttcgttcatagcaaatcaaccgactgtctatcctaatgtccatcgcatcattgctgatcataccctacaccagcagcggatacaacagacaggtaccatgtcttcggtttaaagaatcatttgatggaaaacaaaagagcctaatctcatagcggccaaattcaggacaaatatcctaataatagaaggaatagaaagacttatgctaacaaaagacatcaagaccaccaagtctgatctcgtaataaacaaaaggttgaaaaatgaagacaacgggcaaccagtgtgcaccattgacgccaatgtgcaatgtaataagtaagcgacaggaagggaaactccagaagatattccgggttgggtacattgctcccagaagcaccagatgtagatagcagacgaaaagaaagaaatggacacgttctatcaattcgtttcacagcttcagaatggtgtttcggcttcataacatgtcgtaaaatcactgagtcgagccggacgggttgtccgggcttctattcggactcagaatgtccacagagggaaggtcgttattctctttagatgacgtctcgggcccggggtcttgtttgtcattgctgttggccattctctgaagaacctcttcattggccttctctgccgctgcgggattatctgcaagaccggaagccacgaggcttttctgtgctttctcgacaatcttatcggcctcactcacgcccccagccacctttgtatgcgggtccccgtccacgcctatcaattccgcattgttgttgacaatgtccttgacacggttggagtcgaggcgaatcaccatgcaagacaggttgtcggtgctgaaccgtgcaagggcgtggtcaacaagaatctttgaggcatgttgagcatcttgaacgttccggattagatcgacagattcctgatcactgcagacgtcccatagctattgaattataattagctttcttgtatcatcaactttgtgaatagatttcaacttacaccatcgcaggccaagatgataaactcatcggaatctggctggataaccgtctctgtcgtgtagggatgcccagtcacaaggtctttcaaatatgcatcgcccaaggcacgggtgacggccagaactccattcacacggttgttcaggattagcccgccagcgttggcaactcttctcccttcattctcatcgctacccttatggtcataggacaaacgaagtgctttcccattacgacataatacaatgcgtgcatcgccaacgttggctgtgtacaatacccgttgccgaatagccttgtcctgcaacttcgggagcacaccagagacgcccggagtagcttgagtcggggtttcgacattctctgaattcgcatccgctttcgtcgccgcggcagccgccgtgccaatggcagaagaaccggtggccgactgtgagttgggtacacgatcttcccaccgaagcacggcagtgacggctgtgcacccagagtttttgacaggcaatttctccaactgctggtccacactggtgaaagtctgatcaagaagctctggaacgggagtgcctgggcttttgcgcatgacatcctcaagaatcaaatgcaacttctttccacaccactctgcggcaaaggtgccggcatgcccatcgaaaatcgcaaaatagccattgtctgtttctacaacggtagatgaatcctctgatgactgtgacacgctagtcttgggggaactagcaccatttagctctggtgcagttggggcaggggtgcctaggaaattgtagagataggcatgcgtatcttccattgtccggcgacatttgcgattacggtcttcggtaacaccaacgcggaaggatgaccgagcagtcggcgcagattcaccggcggagttattgaacgacccttgagggacgctgagggccgggtccatctttccaagcttctgtagtgggctttccgcaatcgagggactggtgctgatcgcagaactatcccggccgttcaagttcagggaacttttggcgctattgaagaaatttgccgctttggtaacggtactactcctgcgcttcttctcgccagtggtaccctgttcttcactttgtcgacggttgaaaaacccagcgctgggcggagagaatctcttatctcgtggactggtaccgattgaatcggtttggagggtcaaggagttggggtcgaggccagcctctgggagtgcgtctactttatctttaggtgggctcgaggagccactgaacattctgctcagtaacccaccctgcgaagaaaaactgcggcgcttatttcctgccagcttgattgtatcccttcaagaggaattggtggatcgggatggtggtttagtgatgggcggggcgagcacggagggggcgctgcgaggctgacgtaggagtcggtcggtcgaggccgaaataggaagaattgggctgtaagtgctaaataaatcagcaacgagtatttttgggagcgaagagatgtctgaaatgaaagacaatgaggcgcaaatataaagaggaagatggtttaggcagtgagcggcacagacatgcaatgggggggggggggcgcatagtaggatcacgaggggaggtgttgtctcttccaacacataaaatatgaaacacaagtaagagaaacaagaccaatcagagcaattcagagtatatgaaacccatcaatcctccgagcaaggtacaatgtacatatttgcaccattggtcaatgtatagcgcgtctaatgatccgaccacatccccaacccaggcagatatgaaactcggtatcaaatgaaatcgagaaaaggaagcaacttacaagtcaggattgagagaatgggattgtgagtagaggatgaaaggtgaaaggtggaagaaggtgaaagaggaaaaccacctaaatgacctccgctgacggctcacacggcactgggcggagagagccaagactgccggggtggaaatggatcttagatctgatatatggggtatctcgtggatctgatatatttcatatacttgatttcagaggcatattggagtgtatacgaggtccgttgcgaattcatcgtacgcatgtttatgacacctctccgcctttggtcgatgacgctatgatcttgtttcttgttatcttgccactgtcatactcatgcacgacataggtagatctagatttaaacagctaacctcgcaaactccaatgtacctgcatcgtccgcttcattgtggataggttgctcactttcatcagcctcggtcccttgttgaaggtcgctttcgtccttcgccttcttgatatccatatgacctagtgtatattcatctggatcccacgccaaaactctgctattcatctcctccaatttctgcacagcaagccgtcccatatcaagtttctcctcggagttcaagtgctcaagtctttccttccatgcatcggcgggatcagaacactagttggtccgaaaaatcgactgtcgatcttttgccagtatgtagcatcgaatgcaaaattgttcctcgcgatgtacgcaatccagaaatccccactttcccaactctcttgcatcggaccagacagtctctggtcttcttttagttgagacttcttgatcgctttatcctcgcgattgatcagggcccttaggaatgtctgaagtcgacactcatactccctacaccagtcttcaagaccgccatctgtgggccagtattcgggcttttcaataagaagccaccaaggtggcacgtaggtgaattcaacgggggcagcatatgtgaacttccagtccacaactgcagcaattttcgattccttgttgagaaggacattacctggtcggaaatcgtcgcaccaaagtttaaaggggctatgctcaaaagatgcccatcgtcttgtgagtttttgttctcgcgcgagttttcggaagagacatctggcaacgaacttgtgtcgacagtcatcggccgagtcaacggcgtcgttcctttggttcataagatgtgtcatatgcagctctgctaagctcttgaagtataacgatgttgaatcgaatgtagtgtccaggcccggtaagcacgcttgaggcagtgatcctaatcgaataagttcattcataggcatcgaaagaggtcgagatgccacttcccaggtgagatcatcaatctggccaagtgaccctatatgagtaagggacggccgagagagctgaagcagaatatttgccagctctccctagagccgctcaagttcatcctcatcaaaatccgggtcaagaattctacggtatgcccgtgagcgacctggcgtattgagaacatcgtacatgttcgtatggtgatccatgtattccatgattataaaggggcccaactctggatccaaagggccgtccttccgcgtgccccaatgaaggacaaaaggaaccgggatggaagtctggtcaagaatgtatcgcattatagcgacctcattgcggactttctcttcgggaaacataatggcaccagctgtggaagacgtattatagcggaactagtattcttgtatgtcatctcaaaagagatattgaaagctcctttttccaaaaaatcaaatgagtcaggcttgtcgggttcgtgatgtctcacaaggaaacgtccaagctttctcaagatgtcgaggtcggtgaactgggcgatccaagcttcagacatctcttcgcttttctcccaggcagcatcatcgtagtacatgcgtggtttcataattatggatagcttgtatagatgaacttggaggagataggggaagatcaaaggtgcatagcgtgacgccgcgtgagcactaaactggaaagggaaagctagaagatccacttgatacatcataaatatgaagttctcaggttaggtacttatgtacacctacgtggcatacgtaggcaattagccttgataactatagaatctgcttagtgtaaccaattgcaggatgtgatcaagcatattcacataaaactacaactcgaagaagaaaagaaagcattaggaattagatctattaccatgaactaaagtttccaaagcctccagacaccttggcctttttgcgagcgggctcaggtgcaatctcctcgtccagaaactctacaatctcatcttcttcctgtccatcccggtcttccagtgctgccttcagatactttccaactcccgagacaccgccatcatttgagtccgcctcagaaccgcggacccgctttccagtccaggtgactcgatcatcgtccgcacggcgagaaatctcctcttcctcttctgcagaaggacccgtggcacctgtggcccgcgcctcttcggcgcgcttctgggccaggaagtcctcgaacggatctacaaagaccgttatttccttgatacgaatatcgggggtagggcgattcgtagttgtttccactgggtggatctctagcttattcaaagtagtggacgaaggcgttgggtcgtcgattagacggccgaagatggtgtgcttgaggttgagatgaggtagggctcgataggcgatgaagctgaaagcacatgttagcgcactcattgagccaggggtaatcgcaaggggccacttacaattgactactatttgtgtttttgcctttgttggccatgctcagcgtgcctcgggaatcgtgcttcaaaggcccttcaaattcatcggcaaagtatttgccccaaatactctcgccacctcgtccagtaccagttggatcaccaccctggagcatgaagcccttgatattacggtgaaatggtatatcgttgtaatagcccttcttggccaactgaaggaagttccacacggctttgggcgcatgctcgggatacaactccagattgagatgcccggcggtggtcacaatgcgcgcgtaagccttggccttcacgcggccacgcttgagcatgtattcctcctccgatagtaccgctagctcggcagacgtgtgtggcgtcagcccggtgctagtaaacgacgcagccgccttgcccgtagtgaatcgtgcagcgttgtagggtgttggctttcccgtttgccccttagaagctacattcgcagctacagtcttcgaacccactttcgagccaatcgcagcagaaccagcctgctgagcacgttctgaccgtgcctttgcaactgcctctttcgctttcagaatcttcgccgagctgccgagtgcactggtgttgacgctcccagaggtcggttggccttccaagattcctgtctccccctccttgatgtagttgaacgagctgaggttgcgcgactcgatgttctgcgggtcctgcaaggtgataatatcttttcggctgaattcctcatccgtgaccaagtcgcgccacaattttcccttgatgttgagtcgctccaccgtatcccaggaaaagacattccctgtattccgtaatgcgacgatatgtgtattatcggtcagaatcttgtaggtcaccggatcgacgtagtcaccatcctcgttcttcgcgagagtcaacttaatcaagtccgagctcttcaatggggccccatcgacaggattggtcccatgcttcttgatccatggcagaatgtttgtgaggtcgaatagtgttcctgtaggcgtgcaaaccgggtgtgaaaatggttggagggaaagggaacagaaattgaacggcaagcgcttgaacgcggcgtgggggccgcccttcttggccttggaaactccagcgccagcactggccgagaaagcatctgcagatgcccactcggagtgtgtgatctagagagagtacaattatcagcggggattcaagatgcgagtattggaatgtagaggaaaatgtcgcgtacataaagcttatcggttcctatagtcaacagcgttagtgaaattgtacaaaaaagccctcacacacgacataccttttcccataattgaagatcaagctgttcagcaactttcgcgcagcgcagcccgcggagatcgaatgacggcaggacgcttaccgctttgagattacggggcgaataatattgccgcgcagaaaatatatcaataagtaagcggagtaaaaggcggtaggctccattaccctcttcgagcaagatatagatatccaacttctacaagggaaatatgggcttaaaattccatttgtattatctggcttcgacatttcgggccatttgtccagaacctgaggtcagaacaaggccagtggataatcatacatgtacaagtgctaaccccccgctagaaatcctagaaacccatgcatcatgaaaacaaacgctgtgtgaacagagctaccagctccgcctgaatcgtcacgcaaattgaaaacgcctccgatgacaatgtagatcgtggtaattcataggattagaaagggccgttgtgtttaggaaattgcgggttggtacttcaatggcacgacccatttgtttccgaaatcaattccatggcgacgacgggtaccgtactttctccagacgatctgagggattccgatgtcggcaactgccagattccaggatagtctttcaccagacagaacagcattcagcactccagtcttgggcgctccgaggcacaccacagatgtggcattgacgcaaagtcggccaccttcgaccagagtaacctcgcctgtagatttttctatattagccacaccagttcagactatttttcgtaagtacttaccagtagaagcattgagtccggaggggacatccacagacaacacatcgacgttgctgcggttcatccacgcaatcatctcaaaggccacaccctggtcgtcagttcgaaggtcgtcaaaggacagatgcatgccaaacaacgcgtcaataatcaagtcgggccctaggtccgaggtggccaaacgggcggatagttcttcccatttgagtacacgtcccccaaccttgcggaagatatcgagctgtttgcgacagttctccagcaattcagcttcgtgttcgagcccgagcaaacagactgtaacccggtgacctcggttacgcagatggcgagcagcagcaatcgcccttgccccagtgcgatggttgccagtaaggataagcatagtgggtgcagcagcatcattggacagaagagccacggcagcctcagctattccccgacctgcattctctgtaatgatctcatcggccaatccaaactcggcgaccgagatttgctcgatctccagagtctgcaacgggctcaccgtaggacagctgcgattggtggttgcgagccggaaagctccagcactagaaacattaggcgcaatcattggcgacaccgacgatcggcttggacgagggctagttgtacgagaaatgttgacgtgaagctggctgcggccaagcgcactgagctgtggcaccattggcggggcctgcatcgcgctgtctttgcggggaggctgagcgtgcgcaggcgcccttggccgctcgcgtcccgaaagtgtctcgctgctcagtttgatttcactaattccttccacatcatccccggtgtcgctgtactgtgggctatcgagtacattctccgtccagtgtaggttctttccgccgttggtgcccggcttgactcttcggttgaagctcaccagtcgctcctcgtctgcggtagtgtcatcgtttcgaatttgttcaaatacagtccgcttatcgaattttgacaggttgcttgcgaagtcgaattcgcccagctcttggatgtcagtagcatcttcggttgcccagccacttggatcctcggcataacggcgtgacttcttcttgcgaagtttatttccagaccggctcatagcttcaggtgaatcctggaatgcagggacagctggctccacaaatgcagtctggcgccagcctttgctctttgggttggtgcttgctgcgccgccgtgtttagcgacatatcctctctcttcccgtacattttcttggttgccacgtcgactccgctttggtgtctgttttgatggtgacagttcctgtgggctttggagtaatttcttgtgggaagtcccttgtattccggtcttgtcactatctgcattcaattccaggctgctaaatggctcaaccaaagaggctgagaccaccccagagtgttggctggcggggacagtcattggcgcattctcaacaaacggattagatacgagaggggcttttgaaaaactcagaatagccgggtcggtaaatcgttgctgtgttggagtagattgagtgggcgctgggggcaaggccattgctgcataaggttgaagctgggggttaggttgatgctgaggttgaagctgaggtaggtgctgatgctgcgagggaacctgggtattggtttcgagagagagggtggtgatagcagaggcatcaatggaatattgaggcaggcgttgaccgttccagagaaatgtgactaattaccaaagggttagttattatgacattacatactgtactcattcatggcttaccatcctggagcaacaagcgctgcccaaatacgttggcgacctggcccaccagtcttccaccgtgtggctctttcaatgtcaccagcacattgtagccaataaattcagatgccatgatgattgtgagctttcgtagtccagctgaacaatcatcaagcgtgcaattgtatttgttggaaaagcgcgtcaaacttgagatgaccctacggagttagacgagagagctgtgagacaagctgggcagctcaatcctagggcacgtgatttatactatcgataagcgatagtcgatagtcgatagtcgataagccgtggagtggcgagggggaatacgagaatacgagatactatagatatagatgcccatgggtggtttgaagcaatttgtgtattgttgatgatcaaaatgcattactgatacataagtagtgagaccttttggatatcgatgttatttctgacctgggaaaagaaaaaaaatcgcaatcttatatatgaatcaaaagtcttcgtcctcaaagtcatctgggttcaaagcaattgaggacttcggcttgttgatctctgtgcccctggtgagtttggagtagaattcctgcactttcggatgcaccatcaccttccgaggctcaaatcgagtaacctgcagtccctcctgtgacaccgctcgacttagtgcaacataagcctggcccttttcaaacactcgacccagatcaacttttacacgttgaagagtctggccttgggccttgtgtatggacagggcccacgccaatatcaacggaacttgttgacgttgggcttgtacttctccgttgggaagctcaaccttccacgtctctggttgacacagtaactggcgttctgacccatctggctgaaggaaagatacaagcggccatttccgggccattgaagctgcgccttcttggtttcccataggcttcagcttttttctagcttggtgagcccgctcctcatcgcttccagtcgtcgcgtcaccggtaaagtttttgtcgttttccctgaaaacctcaaagtaatcttcactcatgaaagctaccactttcccaatagagccattgacaagcgaatcctccatattcttaatgagcatcacttgggcacccttcttcagctggatcataggaggggctatgcagcctgccagcagtctcgcgcgttgctgagggtcctgaattgctccggaatccactgcgttgaacctcataatctcgccagaaagtcttcccatgcgtgcagagttggcaccatccacttcagcgcgggttgggaacctaattcaagagtcagatttgacacagtataagtatatagtaaaacttacagttccgttgcctcgaactggtctttggcatcaaggggccgagagagccgtttaaaagcctcaatcgtgcgaggggtgattttacccagtcgcatttcattcagcatattagcaaactccggatctcgttgacggaagatgttggttaagagaacggtatgttggatacaagtggtccaggaagcagctgcaaacgcaaattttgcctcccggttgcctccgtctgggactggaggtaattgaaagaagtcgcctgttacaacaagctggattcctccaaatggacgaccattgttgcgcattcgtcgggcaatctcttcgagtttatcaaatagatccccgtccaccatggagacttcatcaacgacaaggactttggtacgcagccaacgatttcgagctttcgggtttttcttgatctgaatgttgttagcatctgcaattcctgggtgaatagagagagactccaacccttttcactaggtcgggcactggctctttgcctagacctatcccagcaaaactgtggagagtcacacccccgatattgcaggccgcaagacctgttgatgctgtgactgcaattcgatcggattctttgcgatatttatatcgcagctgcgcaataatttccctcatgagtaccgattttcctgttcctgcagaaccagtgaagaacatgctctttccgcgctcgacaacagtcttaagaacagcttgttgctcttcactcaagaaaacattgtgcaccttcgaacagttctctggtttcgggtttatgtcgcttttttgcgtcttcttgtattcttgtcgcaactctctctgttccgctttgatggtgctctcggacttgttccatggttctgcaggcctcgaccgtttgggggtcacaaagctctttttcttgtcttcgcggggttcctcttcttctttcatccaaggaagagtacgaggtttcttcgcgggcggttggaaatgagagggcggcgatgacgaccaaggtaactgcatgctgctgggaggagcttctgcttcttgggatatggatggaagatcggggtaattgacatctgttagattttcgttgccgcaaacagaccggtcgattcccaatgtagtgtcaaggcttggatatgtgactttgttggagatggcggtgccagccacactcggcataatcagcggatagggctcatcgaggtccagatcatcatcgaagtcattttcatcgaaataaaccgcgttatgaagggaccccagcgaggactcggccacttcgatttttcgtttgacaccaccggattgtgattgtaattgtggcttcgaatgggccattgaattagcatgcaataagtcggcttgctgaagaggtttcgtgccactgcctgagtggtcttggagggctttcttgaacattttctcgggggctgccgcgggtcgagatgaggatgaatacgcaaatgaactcggcagtctctttgggcaagtcaaagagagcaatcgaattatgtgtatgccccgcgccctggatatggcaacatgcataaaatagaatgcagaatgcaaaccaagacgatgaggtcgcgtcagacaattccgatcgggacgcagatcgattttcggtaatcaacgcgttgcagacgcgattatctgcacgtgacgggccactgataaggataacaacaacaccgcaaggctgaatatggatttatctcactagctttgtactattcattgcctatttaagacgttaccgagattccttgggattgaatatactgtatgttatacgacggtccaaataattaagcttttgttggcaactaatgaccatattatgacaacttgtctgtaatatatacttcgggtcaattattcaatattcacaacacattgacccaaaacaactatgaactacgagttactatgatttcccatgcaattagacagagtgagctagatcatcattgtagttaagtgcaatttgtgtacctgcattcaagtatactccagaatgcgaggggaaagcataccacgtgatcgtcaattaccgcaaaatacgcgggacgagaatgcagaatctagatctttccaaccaccagtcgcaagagtatcttgccagtcacacgatattgaagcagcctgcactctgcgaccatgaggaatggcagggatggctgtttcgagtacgtggaacggcttttttctttcaaattcgagcacatttgctaacaagtcatgttatagataaagactaccctctgacgggtgtagtcatatgcttcacatccgtacaagttgagaagagagtatgtgtcagaaagactcgtgaaactgcaagcacaggctgacctacgttcctattgtacagactccattgactaaaatggcggaagaaatgggcgcgttgcacagtgttcaccttacttcggacgtaacccatttgcttgtaggtgacacgaacagcgacaagtataaatttgtcgcaagggaacggaatgatgtgctggcaatgaacccggaatggatcgaggctgtacgacactcctggacacagggagaggatatggacatacaggcgttggagaaacaattccggctggcaacattgcatggcctcaaaatctgtatcactgggttttcggaccgtgagttggctggtttccacaattgagcatagatcaacgctaacgaatgcgctgcagttcctttccgagtttacatgaagaagacaaccgaggagaacggggccgaatataggaaagacctgacgaaatccgtgacacatcttattgcgcgcaactcggacggtgaaaaatacaaattcgcgacacaatggaatatcagagttgtttcggtgaaatggtttacggatagcatcgagcgtggaatgatcctggacgagcagaaataccacccgctggtacctgcagcagagcaaggtgtcggggcatgggatcgatccgcaccgacagaaagggagccttctcggaaggacagcactaccgaagagaactctttgaatccgcgacctcgaaaactacgcaggattgcaagtaccaagctggtagatcaaaacgaaagcatctggggagatatcgtaggaacaggattcgataataacgagacggctggaccccaaaagaacccaccacatgaagcatcgaagcctgtcatacaggcatatcagtcattcgccagcgagactacattttctgaaagcacccagtctcggcttccgctaccgactgctccaccaaaagacaatggatttttacacacgacttatttcttcattaatggattctcttctaagcaggtttgtgctcatcctcttgtccacatacccttgaaactaatgtatcttctagactaaagttctacgtgagcatctcacttataacggagctcaattagtgggctcactaaatgagttctctagccctactattcccaaaacagggcatgggctgttcatcatggtgccgtatcagactcctaggtcagaaattccgtcaacggatgaaatggcctttgaatgcgagatcgtgacagagatgtggctggaaagatgcattgatgctcgagcttttgttccacccgagtctcatgtggcaagcactccattccccaaattccctataccaggtgaggtcccatcaaatgcaatattcatacatgctctaataataataggatttccggaattgcgggtttgttccaccggctttggacgtattgatcttttacacctacgcaaactggtagagttgatgggcgccacatacggagattttctaacgccaaaagcatccgttctcatttgcaacgaccccaaaacagccagcgttgacaaattgcggcatactggcgagtggggggttccagcagtgtctgctgactggctttggatatctattcaaactggccaaaagaaggcattcgagccataccttgtccgacgacaattacccccaagtgctggcagcacagaggaactcggttctttatctgctaagcgaaagcagcctgacagacatcttaatgaaacgggttccccgtacaacatctctaccgagtctatgaatggtggtagaaccgaaaagcaaaattctggaaagagcgctgcaagtcgaacaatacccatcgtcggcgacggctttgaggccgatgcaccgaagccctccgtgccggagtctcgatctccaaccccggccaggataccagacgaacaaaccgcagtggaaccgaataacaaacagtccacgccaaatactgacccggcaccacccactggtccatccgcactggatacggctctgagcgggctcctacagcaagcccgcgctgccaagtcacgacaccagtctgagaacaccacgaccaatgatgacgaaaatccaccccgacgaaagcgcaagcccctcctcggccgcgccccgtcccactcttcggcgcgaatgctggaaggcccgcggcctgtctcacgcgccagctcgatcgatacactcaacgacgatggcctcggcagtgccttagagagcgcccacccgaccagagccaactccataacccgcagcaacagccgtgtcgaacaaagcctgtcatccatgctcagcgatggtaagtttgatttcctgaatgacaaactcccgacccataccgaggacgaagacgaggaaaatcaggcaccgcagatgacgcagctggattatgaagatcccgatgcggctgccatgagggcggagttcctgaggggtgctgggaagttgtctggtaaggcaatgaaggccgatagctcgggtttgcttgtcggtgaagtgcgcgagcttgaggatattgggtggggttctgggcggaggacgaggaaacagcctgttaaagtggacgatgaatgatttttgctttttatttttctctcggcgaaggcatggcattgcattgggaatggcgtcgtcctctttggtccatacattgttttgaaagagcgatatataagggttgttaatgataatccaactcggctctatactaagcaagctacatgtcccctggcctaagctgcatttttgatactagatattttagggataagaaggaatacgaagggatcaccaacaggagatattttgaactagatgcacctctcaatcgcttagggaagttagatgtgttggccactccgaacgatggttgtgctttgggaaccgtcgagggctacctgtagccagcggtgattggaggttcacacgtcgatgtgaaagatggactcgagctagcgttagaatgattgcaaaggcacctggcttgttattctcgtcgattcactccacagatcggtagaagatatgcacagtctgatgcattctgacgtgctcactgttgccttatgcagtggggttgggaatatcttcagattcgctacttacaaaacatggtattaagcggtgtcgaaggcagtctaaaattggtgagaactatccttaactatccagctttgctgttacaattatgaaataaatcaggtggcgcgcactggcagagtatgtcatgtattctataaaccacttcaaacaacaaaatatccgagaaaaagcatctcgagcaatgggaatacaagcattatttgtacgcaaattaacacaatgtaaaaataaccaaagtgaacaactacacatgctaaactattcacttgcccttttgggcatcattatgggcagcaccctcatctccctcttcttttcccattcttggtggtgaattatggtcagttccaccacgagaaagccactctagagaagatattgaatgggccgtatagtcgaagcttcaagaacgaattgagatcatgggggttctgaggtttgccatcgaaacgcaaatagtcaaggtattgcgagtgtatattgcgacagcataaaatgatacttgccaattgggttggctctggtacctacccgaatggtaaggcgccattgatcattcatcaatcgcgaatgtgatgggagaagaagtgatcaatcaaaagtgataatgataatgatgatgatggatggaagataaagacctagctactgccatgaagctctctatatagttccatgctacaaagccaccagattccatccttcagaaaccagaagaagcatctctgcaggcaaacaaagaaagtgccaacacagcaagctaaacgacaagctacctgtcagagaagtgaaagaaaaggaaaggaatgccacagagaggtttacaatattacgtgctagctagttactaaagcagtttctcaagtagttgctaaataagtcgctaaagtaattgaagataaagcagtaaattaagcagttagaggcaggggggagaataagccagtaacaggggtactttgcgtagcgttagaagttggaatcagtggcttcgctctgcaacgactatctggaggccttaggccgtcgagatccctagtatacattcgctctatactgagtcggaccttcaaatcggggaattgacaggctaagcaacattagatggttggattgtataaagtacgaattttactgtgggaaaaatgagtcatgacgcactggcggttggagactgccatactgggcagaaatgattgtaaagccgatgtgaaggaacatcgtggtaaaactcaatagaatatggagaatatgcaaaggaaagatgcgcactgtacaagttaggaggcaagagaaaacgagcggaaaacaaacatcgtaggaatcatgagtggttgtacaaaggtgaacataggcttatgcttgcattgccgcagccattcctccaggcaagggagcatcaagatccaaattctcgatagaacggcggttctcgctactgtcccggaacaggttagagaaatatttggtggcaacatcactctcttgcttgattttggtgacctcttgcttgcgtttgccgagatcctcaatatcctgagatagacaggtttgaagattattggcaggcaagcgcaacatgcggcgaacttcagtcgaaattcgattggcatttgagtggacatagtccatctcagcaagggtggcggcgatcttccgcgacaggcgtgggggaagggtggtcgggatggagctgagcacgtaagctgtggtcagaacagcttgtatgaagttagtatatgattgttctttgtgaaaacgaataggcaaaactcaccagcagcgaggagactagggaagaacagccggcgcatgttgttcgggccaatgactttgacagcactcaaggcactatccacccaaccgaatccgcccaatgccctaccaccaagtacagtgactgcagtcattgcaacgcctgttcctgccatcttctcttggcgctcccagagaccagcaaaatcgaagaaatcccacagctcaacttcagtgtcgacctgtcggccaaatgtgtggcgacggccacggcggaacatcgcatccgcgcggaagttgagtggggtaaatttgtcttcaccaatatgcagaagaccgatattttggatgaaaccgactccttgaactgtcttttcccgggcatagtcctcgcagttgttgacagacgaagcaatctcatccagcattgccagcttcagttcctcagcgtactggaacgctgaaaaaagaccaggatattcaacaccgaggtctgcatcagaaacacgtgtgattgtgttagtcaatgtcgaacgagtgtgattgtagacatcatcgcatgaatcgtcgatagccttgttgacaccctctgcaatctctcccttctttttcttgccgttctcgaatgccggtacaagctccgccaattcatcggtcactcgcttgagctccgactgagcaacatcgcggttgactgtggcaagagagccaatgtcagctaagagattcaggagatacgttttggcaggcgcaagcttggaccgagagcgcttttcaaggacgaaacgtcgcaaggctccttcaaggttctcgaagtcttggagtttctcccgttctttgcccttgcccttatctttggagtccttatcggcgtcgtcatcatgaggatcagagccaccgccgtcaccaccaccggagccagactgcgagaaggctgaaggtgcaacaggtatagcattgctcgaaacgaaatgaactagctcagcagcctccttgtatgtgcgagggctgagtttgccgatctgatctaagatcatgcgttcgcagcgtttcttgtcgcgaatttggtcgaatccgttgactaccatgaaaatatatgccttctcatgtgccgcattcaagatgaattcttttgcagacaatgtgaagtgatttgcggcggaaaccacaaacacaacgacgtcgatctcctcctgtcgagcaaagacagccgtggttttcaacgagtccgagtttaatccgggtgcatcgatcaaagcgatgtcaaccacgccgttgttcagcaatgattcgtcaatagaccgtacatccctgacgtagactttgcactgcatgtacttcgtgttttcgatgacgatattttcgagttcggtgagagcatagacatcgaaggtactttcgtcattgcggttgtatggcgtatctttatgaacggcgtggacttcttcaacgctgcaattttcgcgagcatcgagaacctcacagaagatgctggtgcaaggctgttggtcctctggcaacacctttcggcgcagtagagcattgcagaatgtcgatttgcctgcgttcaagtctcctgtaatcaggaccttacttgaagtgtcctcaattctatctcgcagcgaaaggagatgcttcatgctttggctgatttttccatccaacagggcggcaaccgatgccttttctaaggaatgtactagctctgcctgcgaaagagcgccgagcttaagatccaatttgagaatagagaactcttgcgcaatctgcggggtcatcaatctgggctctgtcggcacacgacgttggaccgaggcacttgattctcctaattcgtcgctaactgccaaggtggctgcacgcctcaggggcggggtgctgagtatgttatcattgcctccaaattcggattgagtttgatgtagtgacggtcggaccatgggggaagagggtgtgctccccacggagggatagtgggcgggccattggcggttcatttcctgaagctccttcagtgtgtcgatggtccgggatatcgcacgagcaagcttggttcggtttgagttgctggaaaatactgtaagccttggacttgcatgaatgatttgtttacggggaggggagacatactagagaagttgagagacatgactggcaaccacttgcttctcatgctcagctatatcccaagatgaattagctcaattatcttccctttatatcacaccattccatgtccgtggccacttacctgcgggattccattctccagggcgcgttggagtatgcaccggagtcggcctatcctccatcaatcctgcacgccaagcagagttcgcatcctcctccgtatcagcaatactgcctccatagccagaatcttgattgagcgaagtcatcagggctgtggcactgtccgaagtcgaaccgttgcccacagtcatataagtcggtgggggacggaaaaaaggattcttctgaggaaattcttcctctcctgagaacctggacgagcccgccccggaagacgggccttcaccagggtgatattcctgactcatgacgaatgaaagacctcaacgtgggggcgacatccatacaagagaagttgtgtttttggtggtttgattatgagatgatcgatttgtcggaaggtttcagatgacgtcgggccaaaaacggattagcgtgcatgtgacccggtatcatagtaatgcgcctgtaatattaccataccgcgattgatgtcactatctctactcaggctcccatattgtacctggatttacttcttacctcgaaccgactgcccataatcccctgcaatcatgaatgtaagctgcatattgaatgcttaaacatggatattcactcacattaggtctcctagattgtcgagtgggctttcggaaagcgcatgacccccgcagagcgtctgcgtaaacaccagcgtgccttggaccgaacacagcgggaacttgaccgagagcgagtgaaactagagaaccaagagaagaaactggtacaggacatcaagaagagtgccaaaaatggtcaagttggtgcctgcaagatccaggccaaggatctggttcggacacggaggtcggtttctctttattgtttactgatcaaagcagcattgactgactgcgacaacagatatattcagaagttctatcaaatgcgcacgcaattacaggctatttctctacgcattcaggtatgcgcaagctttcctccgctatccctcttggttccgcgatgcgctgactcttgctgcttcctagactgtccgaagcaacgaacagatgatgcagtcgatgaaaggagccacaatgcttctgggtagtatgaacagacagatgaatctccccgcactgcaacggatcgcgatggaatttgaacgagaaaacgatgttatggaccaacggcaagagatgatggatgatgcgatcgacgaggccacaggaatggaaggcgaagaagaggaaggagaagatatcttgaaggaggttttggacgagattggtgtcgatctgaaccaggcggtttgttgccccaaacattggaaagtggacccagcaggctaacatattccatctacagcttggcgaaacaccccaacacatacagaaagcaccagtgaatgaaactcgagttgcgcaggctattggagggggaggcaatactagtgatgatgacctccaagcaagactggacagccttcggcgatgattacgactcttctctcttatatgccattgatgacggaggtgataatgcgacctgctgttttgagccctaattgagattacttgccttgctgttattattagcataccttggaagatattctaaataccaatccatttcctttcaacctcttcacatttctctcaataggtcaagggtgcctagccgtgaactagatatttatacataaaatcgcattttggctacatactgttgaacaaaatggtgactgttttctattttctatggtacgagtaataggacagcagatcgctatcaaactcaattcgactcccagatctaatactccgcttgtgattgaaacaccattcccgagatataagattggaagctttaggatggtgcctcttcaggagggggaacttactcatattcacaatcatcagatgcgctagaagaaccagaggaattatatctcgggctgttgaggatggggattgatataccttgatcctgtgatatacttggccatggaaaaccccttcgaccatctgcacgggttttatcatggaatttcttgataaagggtcttttcgaaggtcgaccagactcgagttcttcagcagaccagcgagaaaaccaaggaaatgacgatagctcttccaacgacggccggtcaaatttatctctagccaatgtggcttgcagtacatccctgcagtcctgtgagagtgattcgctaattgctacatcctcgttgatcattctcttgcgtctgcgtttgactactggatagaacaggtcattgtaagagccatcatacctagcgtgccagttcaaactcctcggcactggtttaggctcatcccaggcccagaagccatgcagaaacccgtaaaccagcgttgaatatttccacaggcaaatgtcccgctggtcaacaggtaagtagatactttcgatagagacatcatcgtgggatggatccctccaaatgtcgtacttctccagttcgatggctcgctcgggcatcatttggtactcttggtagggaataaagtggtctattttcattgcaaaacctgatttctcaagcgagaagtagagcattccaagatcgattagttgaacgttgaggttttggtccattaggtaattcgtcactgagatatcagcatggcagaccttcatatctgctaattctaccatagcttggagaagctgagaagcaaccttgcaaccttctatttcccccagttgaggttctttggtggctgcggacataagatagctgccatcaaaagatggaaacggggggtatctctttcggatgcgcggtggtatggccccctttgacttgatcctgttgaaatgaccctcatcaataactgaaatggcttcatagctaggatcaacgcagggggtcatgagaattgctgttagcataccgtgagtgtagaccgagttgagccgcgggaaccttggactatcgtcgagatagatcagaagaagtgcttcttctggcatatatcttttctccccactagcctcatagaagggtcccatctgagcattcacacccgataatgtgtccatccattgtgttgtgtggatttgagatttgattgcgaattgttgaaggtcctccagggaagcaccagcagcgcctttctcgcgagcaataaatgtggcaccaaatgctgtgatcagttagcagtatatccatgaaaaagacatcacatcaaggggaggatggacttacttcctgcgcctatgaacccatatatctgcactcgctcgataaggtgcggacaaaggcatactgctttcgcagtcgtccgcccctcagcacttaaacggatgaaatccccatatgaagtggagttgcatttttgaaacacttcgctgtcgcacctatgacctgaatcgtcccggcaattacacctcgagaattcctcgttattccgtttgccaaacgctacccctagacgctctcgaagaacctgacttacttggggatacctttcggacaatcggcttgaggggtctaaaagtctttcggcattgtaagagaagctatcatcgtagtcctggtatttgaattcgcgggcctgcgacgatggatggtgtaaagtatgattccccttgattgcgcccaagtctctccctaagatataatcaaaagcgtaaggatcctgttcattaacgcccatctgttcagtcatggcagttgattaaattagtcaaatagacaaaagtgatgagtgcagtgagggaagtccaaggagcaaagtaggtcgtttatataaaactcccaaagaatgttcaatgtattgttctcagaatagacaaatgaaaggaatccttcgaaacaattcttatgaatatcaaagagttcctttttagaacaataaacaaggaggtcacctgtaacaaaattaagccactaaaatcttatatttctcagatgatgttcgtatccagataatattcacccgggcgacttgggatagtcatgaggctgaagttgccttgttttgagcctctgcgcccgggcaagaaacgagaatcgggaaagagaaaagtcaagtatacgagcaaacaagatacataaataggtgtctatattctcctcaaagagtcagatttcttcaaacagccgactttcacttcaaaggaagaaacaaagacaatcattcaaccctctgcccttaccaacaacaattcgatgcaaacctcaaaggacaccccaaacacaaacccatcgtttccggtcggccatttgcgatatgaccagaaatgttcggcctccgattcagcaagtcgtgtttacgagggcttcacattttccaaggctatgctcgaacaaagttccacatggatctgtgcgaaacggacagacatgcatcggaatcaagacgaatacttcaaaatggttcatgagggagcaaatcaacagtctgtagcgcagcaataccagagcatatcctctgatatcaggcgcgctcatgtgaatcaactgattgccgaacaaaggcataacaatccactcgttgagtggagttgcgtctacgtcaaagaacacacgcagatgttcgaggccggaaattctcgttgcgcttactatgagactgtatctatggatgtcatcatcatgcaaagaccgatgaagacccaagtacattccagaacctccatgggtggtccagtggctactaggaaaaccttccggccggatacaaagagttcatttatgtgctctcgtcacagggacatttctctgacgccagatcaaaatgggaagatcaatgccataaacagcagcggcatgagtcttgaagatactttagattgttcatcagaaagtaatagcgacccagatgatgcatctatgctttctgaccaatccgatgaaacatctgcaacagacgaccgagaaagaatggagaccgagaccgagaccgggaccgagactgagtgtcaagaaccgcgaccaaatcaggtctttgtccaaaaacagaatgccagtccttatcgacgcgagccgagtcatggacttcattttcggcgaaagtcacaaggatgcagcgggagccttgaaagaaggcatggcaggaattatctccgcgatcagtttgaggtgtctccagtcaagattcttggcccacgatgggctgaaagggtttggtcaggctcggtgcctagtagaagatatcgaatgcaggtgatgaacgacaatgagattcgaagccgaatgcttgatcaccgtgaagcatgtcttggacatcgggagcagtggctgaagagagccttttctgaagcgcgtcagcttgagcgtcctcaaccggtgacagatctgccaacagtgtgccgctgtacctgtcggtgcgcgatcaaggaggatgtatgacagatatattattttattttgcatactaatttgatatggctactgcttttttttcctaccatgagaagaactgtttttaattgcatcattagtttggaatagtcagatttatataaacaaaatttgatcagtcaggtttactaaacgatacacccttcctatttagtgctcatcctggcacagacccacattgagatagtccccctgtgctgcttatcaagtcgtaactccatacctcttgctgcgttgctcaattgcagatctagcggttgtttctgcctaggaagcacattacaagaatagcaaggataatgtacaaaacgcctaagtcgaattagaaatgcaccacttgtgttggaagggatgacttactccaagtcaagctcatacaagtataaccgaagtgttccttgagggatccaccgatgattggtcccagaactgtcccaagcgatgcagcaacatcatcaagagagaaaacacgcgacatgcccccttcaggtccgaagataccaggtgaatcctcttgataagctctcacaatggctgtcaagagtcaatagcaaatactaaagtcgggataaggcagcactcaccggaaagttcgacggggcccacattcgtggtaaaaggtcgcgctgcaccaatggcgagaatgcagcctgtatacaacgctccacctccggcctgagtaccggtccaagggagaatgttggtaccggctaggcccaatagcccaagaatcaccgcttgaaaacccgcagaagccatagcaggataccggactccgaagcgatcacgcaaccacccagccaatggactgataaacagagttggcataatgagacaagagaacaagaacccgctttttccggggccccagccgaatgtttcttgcacatgaatgggaagggtagcatggaagctcgtgccaaccgttgttgtcgacacggcaacgaacaatgcagtcagcgctcgaacatcagtgagaataatatgccagaagttccctgcggtggatggagtttgggcgttctcgggagcgagtaacgggctggtagtgtcatgcgtttctgatcctgtcgattctcgcttgcaattggaattctctactgatcggctttcgatcatgataaaacgcgcgccaaaatctatagtgagaagcaagagcggcaatgaccacgtcggccaatagcctacaagttccaagagcaaaccagaaatggatggcccgcctattaatccagtatatatgaaggacatcattaagccctcgaccttacccatattatctccacccacggtatcagccacggtcgcgaggccaacaatccatacggaggatccggcaatgccctgcatcacacgaccgacgaagagaacagcaagcgaggttgagccagcgaccatgccagtaccgatcatacacgcgacaagcgatagtagtagtgggagctttcgattcgaggttttatcagcgaagtggccgatgatgggacctgaaacaaccgagacgattccatgcacggcgagaacaagtgacgtgagttcctggatcctggattgattctcatgtagtcgcgtacgaagcatgtacggtaacataggcacaaggaagccatagaggaatgtttctatgcactgtcagccactggctcaacaagagggcacagggtacacgaaccggcgaacaaggcaattgcgactgtcgagagaataaaccatttagaagagcgccaacggaagcctataggcttactactggcatggaaatccctcatgtcgacttgagttgtgagtagtaaagttcaatgccatgaaaatgctataggaatatcatcatcgctacaaaagcaaggtttgacctgcaggatcgctgatcctcagctgggggcagttcatgcgacgataatgcagggatagtgcagccgtatcagactagtattgcccagtcttatagactacgaatcggactgaccgggtctgcagtctccacataagatcgagggtgaaattgaaatgacttatagaactgtggagacctgagggttatgctttttgctcatacctattggtccatgtctcatccaactcgtactaaagtagatgattctattcttttttcctttgaaaacaaggctatgaatgtcccagtgttcagaagatagtacttggtacatgcgtgacaattgtagatcatcgaatatcgatcactttaacattctaaagagctccaagtaagacgaaagagcaggcatcatctgcccatctcgacctgacagcttcagctaatctagtcttgtgtcttgtcgatgaaattaatcactttccgtcccgtagtgcttctgatgaatcccgaataatcacataggtatttcaaatcgaagagctcttcgttgttcccaaaaacggtgaagaatcttcgtaactcctgtgtcagttcttcttcgccaatcgtgcctggctcatcgtgccgaagcacacgcagctcaagaacaatgtcgagatggtccttatctccttcattatacctccggatgatctgatactgcaaaataccccatgactcggttcgtagtgcagcctggacaactgggaattcgaagtactcgccgtaccaatcaaagctgattcttcggtcgcgtccataaatccgcgcgactttgtagtgaggtgcatcttccggtgagattttggctttgataaactctggcaaggagtggagcgagcaaacatcaccacagacatagcggatgagaggatgacgcagtctctgcagcgaggtttgcacaagcagccctttctcgccatcaggaagaggccgaacatcgacattacatgggtcttgagggtcctccacagcaaaagggaatacctcaagatgcatcagacgctggtcatacacaaaatcggcgaagtgttgctccttcgtggtctctgtcagctcggctggcgaagcggcccaaggcccagcttccgcactaccaattaccgacgagacagctatattgggaaagacagagttcaaaaagctgcgctgggccggggtcattggctctgaggtatacagcgccttgtttatcagcagttgccttctcttgtcctctgagagggtagagatgtatcgcgctagctgaatgatttgtcctgcgtcaccggcaatggcatttactcgatatccaatgagtgtctcgatcatctggtcttgctccatctggctgccagcacaaagaaccgtggcgccagacccctcgagcacctcggaaataaggtccaaagccctgcaagagttaaaatcagtttttccccaattgaatgaatacaagtcaaaaattacctgtaaagatgtcccgacacgtgcattgtcatgatccagtctcctggtcctgtgatcccacaagatcgcaagagagatccaatggctgctcgttgttgacggatctctcgcgaatccgttgcaaagaccattggaggccctccaccagatcctccaccagtcgtgctgatgtaagttccttgtcgatatccatttcgagggtcttggtcagtggtaaggcgagcgatctccttgtatctagcacttttagctatgcaggaaagaaatgaaagcgggaaagcttacagagcttctttccgggtcaatgggaatgctgatagcttgaagtctgttgctgactctttttgctttgctagcagaataggtaaatcttcacttttcgttggatatggagtgtcagaataaaacgggtggatactggcaatggccagaatatcgcccaagtcgaagcagttcgtcatcttcagataagacgcaaacttcaggtatgagcacagtgcatgctacaatcagcaaacttgagcatttatgagctcaatatggaagtatttattagtcaattctataggtaaagtgggttctggtggcgggaggtggagtacattattcaatagtagcgtcgcgctaatgtgcctataaatgtggaccagatggagacccctagggatgcagatcgcctcatgcattagtatgtactagtattcattagttgtatcaataccggtgtatttgactcaaaaacaccagtgaggtatacctatatcaagaccgccacttaagaaatgcagccgccagaatatcatgtccatttagaacaacttttacatcaccgcgggcgcaactatgaagaagccagtgaaccactttagcagtatttgctttccccaaagtggtgaaaatttctttcacccagcagatattgaccccgagactcgatccgctctacttgagaagtatcatctcgagctcgagaagtgtagccgtcgggagacgtgggctggtgatgcccaccataaatcggtgccttatccagtgcttggcaacgaagctcatcaacgtcagctttcagagctaagcgaggcattggttctagcaattaccgatattgtggaacgatggtggtcggatgttgaggcccgctttccaaagcggatgccggtcgaaccagttgaggaaaacctgctgcaagtgagtctgaatccttggaattttgttgattcttgctaaagtggtttagtggatgcaacaactggatgcacatgtacttcgtccattcagatcctgtcaaggctcctggaggcccgactttctgcttgaatcgtcggatgaccccgagcggatcgagaattatcgaatctgcgagatcaacgctcggttttgttggaatggattcctctttactgcatttggccaacaggcccttctgaatatgggtgtcgagcaatatggtatcaagggagccacagacccgcaaaaggtcagaacctcgcgtgcctatacataatagatactgatacagtacaggtcattactggtttgaacagcctttttgattcttcactccccttacatctagtcaagggggaggagtacggatacgatatccacatgttcgtcccatatgcacagcgttgcctggggatggatgttaaagtcattcctcccgagagtctccggttgatacccgctgcagctcccggtggatacaaattgtactgtctgtctggggaaaataccaaacagccgacaatattgaatgatgccggcgagtctttagaagaagtgcatcagctaggtgtggaactgcatcaacgagagttgcttgccatgagctttgaaatgcttcagcaaatcagcctgagatgtttcaacgacctgcgtactgtgcttctcgttcatgacaagcgcatgttaggcttaattcaagaagagctggattcactggttgcacgaaacgtactctcgccgcaccaagcagggatacttgataaaggacttgtccacacgatgatacccggatcagacaaattggagcatttcatatccaggtgccagagagacgtctttaccaaggacaactatctgcttaagccagttcgcagcggtaagggagcggggatcttatttggtgatcaggtcacacaggaggagtggatgtcacttctccagggcatgcgagatcctcgcctaaaatctgggaaaacaacctatgttgttcagaagcaaattcaacaacggatatatgatgttctgcttgaagaggacgctggagttggaaactttcctcttgtcggaacctttcacatcaccaatggcgcattcctcggccttggactctggcgaagcggccccggtcgaatttgtgctttaagtcgtgggggagcctggatgtgttcagtgattcaacagtgacgaagactgatttccctggggccaatactgttcgagccatctcatctcactatctagtctgatttcatcttacgctataagatttgcccttttgttactttggttcgatgaagatactttcagaaatgaccaggcatgcctaagatcttagatgggctgcatgtaactagcttaccccgtataactaggtgtggactatgtgtgtaaggtccatgtctctgtagcatagactagatctacggagcaatcaccgagagtgcagccagtgcatcggcctccgccaattccgaatcgtcaaatatcaacctcacatatgaccgtattggtacatgatacacgatacgataaatgtcagcttggttcagctgactgaggaagcgtaggtaaagcagggagtggcgtaacaagtatccactcctcacgattgattatgggcatgagaagaaaccattagcaaacgaaaaccttctttccgacgcatccaatttcctcgcaaccgctaaagcagtgagatctgcttgcatatggagaaatcatactttagctcagccgtacttggtataatgtcgtgggtcaatttttgttccaggaatgtggaggtggctcgcgagcaagcatgatgaagtaggtgcgagggatgagcaatcgtcggtatatattcaatgtataaaacactctggtacccttggtcctcgccttcttccatcctatcatcattaataatggctacaatccaacgattaacgagatctctccccacgacaaggaagcaagtcgttcaagtacctagaatatgtgagctttgagtccacactcttctccccatatttgctaatgaaaattgccattttggacctatagcacgtctcacagtctcgaatcctgccactgcttcccaacatgaccacctgcgtactgtccatcacacccttcagagtgccggcgttctacaaatccaactcggcttccccgatgacgaaagcacttaccttcacaaactattattgaatttgcaccaacaccacggccatggactaccgatcacacacagtgcaaatcgaggttggatgtgggacattcggcccagccccgaaagcttccagagcaacaatactcaagctcgatctgagaccatggaagaattcccttggcacacagattgcagctatgagagctctccaccgcaatacttcgccctccaggttcttcagccagatcgatgtgggggcggtacattatccgtcttgaatgtcgacgaattgctcacacttctctcaccttccacccttgagaccctcttcagccccaattttcagatcactgtcccacccgagttcgtcaaaagtcaggcagatacacagatcgtcggtggcctgctggcaattagccccgagacgaacgccatcaagctccgcttccgggaggacattgttgtgccgctcacaaatcaggcatctgaagcgctagctgaactgaaatccgtcctgttgggcccagcagcccattcccgaatactcaacttgagagccaagaatctcccgcgtgggtcgatcattttgatggacaatggacgctggctccacgcacggaacgaagtcaaggacccagatcgacatttgcgacgagtgcgttgggacgctcggcaatttgccagaccttccgctgctcatctaggtttgtaattgcgccatgagataccaagcctgcgctcagcatgtttggttgcattttcttctcataattgagattatatagtataactcaatgcatttccggtgtcattgtcacttgcctatactattgttttgaaaatcaaaatcctttctcgcaccatctactatgtggatcttctaagcccgattgggtttgttatccagccacgtaccttccacagtggccgaacaatgccgaggaatggactcctctttcgatggggcttcagctgtaagaacacgggttcctgacctgtaccttgacccatatatatgggttcgccccgctggatcagatttgtgttttttttccggtggtacagggtctatctcccgcttgcaaagtctggatggcatcggaactgcagatggcagatcgaaagcgatcgacacaaagttcctggatttggtagcatattggcaatggcaaatgcccctggcgttgccatacagtgagtgtatgtactccgtatttggcggtactctatatagttaccgccatatataccgcccacttgttaaaatactaccataggttaactagttatgtgttatagaccggcagaactggcagaattgaaatagcggtacggagtacggagtactccgtataatgcaaaatccttcccaacacttcagaagtcccactgtatatgcgcgcagctcgcttaaatagaaagacaagtgctcaaccaacacccagtcttcatatcacatgcgtttcctaatactctgagacacccccaggcttgattccagaaattatctccacatttgtatgttgcctaatccgtgagttggctcttgctgggaaggaagctcagggttcactgcactctcggcgtactatattaccttggcaaataaccaatgtcttggctgaactcaatgttacagtttgtgtgtgtataatttactatgacccatcgcgggttgaatatcacatcacgtgacatttatagatccaatgactgacatcttccttggctaatattctgactactttccttgactgctgtgtggtgacatagaaagacgaccccgatcttgggaggaagtgaattcaaattcggagaattcttaggcgagaactgagacacctttctcaagcatagctatcttatattatccgtcggaagagcataactatctgaatagtacagagtgtctagtatcaatttgcttcgctcgacatcgcagctgcagatctcgcgtcctccttttggaggaccaagaaaaacaaggaacagatatactcgagtttgaataatgagcagtatctattacatctttttctggagctctgccttcaggacgacttaattacctagtttatacggcagtagcccctcgttgaaccggaatttcggttatttactttcaagtttgttagtggaattctaaaatcgttgtttgcgaaatgtctactccatgcattgataatgttggagctgtcacaggttggaaacactctagtaagaatgggtctatacccaatcaatagtactaggaggagcgctccgccaactattccatgaagacttcaggaagagacaagcaactgcgtactgcaaggagagctttccttggacaatagaccaaaaatttgccattctaggaacgtctagagtcacttaccttgcacaatagctcacatcctctcgtgatgtcttttttgtatgtcttctgttccacaacgataaaaggaatagaaaaaggcgttaggagtggctatatcatctcgtgataccattgtggtcttagagcaaacaaataaaactcgtgatatgtaattctgaagactaaggccgaatttttaagtatcttgcttacagctctccgagtatgagaataagacataaaggttcagaccaaaaacttcatatataaatggccctgtcatctaaattactggctacatataacactctggcgtctttcccaagcgctgcctacttgctacttgtataaatcgcccaagattgttcaatccctcgctcttgatcatcactgataggctcgaaatcaacagcgctggtatcttgttcatcctttagtgcttgcctcttcctttgagagtggacacacaaagaaataacattatctcttgtatcgtgcttggtttgagatcgacgataatggcagacatcacgagcagatttagatagccgctcaacgaggaatcgagagcataagagatatgatagttgagtagtagacaaatcgagtctgaatcttttgaccttgaccatcattagttgtaagcttaagggtcttgagtgcattgggggtaacctcaagagtcaagaccctccgatagacttgtgaaattcctcgcatcatggtcgaaggaagtggctttgacaagatgggctcattcgatcgtaagatcggtaaattgaaaagaacagggacaacgaagattattacagggctgattgactaaatgttgagccaattgatgggatgtgaacctggggccataggaagacagtagcctcgcctttactgtgggtttagctttgctggcatgttgggccgcagtatgttgtaggtatggtaaagtactgagtggaggggtctttctatgttggaggggcattaagggatgacgtaattgagcgctaaacccagagaagcaaaactaacttgaaagggaaattcatcgtttacataaccgatttactttcccagagtcccttctcccggccaagtcttcttcttcttccatagctatcaacattcctgaaacttcttctttctcttttccatcccctcataaactttcaatatgcctcgccaattcttcgtcggtggtaacttcaagatgtacgttgtctcaagctatgctaccccgcggtctcaagcccctcacattttaccaatgcctactcgttcgcgcaattgaccctataaaggaacggtgttgctaagagcatcaccgaaatcgtgaagaacctcaattccgccaagcttgacgacagcaccgaggtcgtcatctctcctcccgccatctacctcgctctgacccgcgagctggccgaccccaagattggtgtcgctgcccaaaacgtttacgacaagcccaacggtgctttcaccggtgagatcagtgttgagcagctccgcgatgccaagatcaactgggttgttatcggccacagcgagcgccgagtgatcctgaaggagtctgatgatgtatgcataccccgcagtccccgaaaccccaatcatcctcaaacactgcagccgaatgaagcatcaactaaccactgccccaatagttcattgcccgcaagaccaaggccgccattgagggcggtgtctctgtcatcttctgtatcggagagaccctcgaggtacgtcattagaacccggttttcccattttcgttccgatagtgggtcatcgggtccagatcggctatatgtcttctgaatgcatcccgctcacacccgattcttatgtaggagcgtgaggccaacaagaccatcgaggtcgtcacccgtcagcttgacgctgccgccaaggagctgagcgcagagcagtgggacaaggtcgtcattgcctacgagcctgtctggtatgaacttatcgcattgcttctaaatcaacatacccctggacatatctaacatgtatttgtagggctattggcactggaaaggtcgccaccactgagcaggctcaggaggtccacgccgctatccgcaagtggctcggcgaggctatctccgcccacgctcaggagagcgttcgcatcatttacggtggctctgtcagcgagaagaactgccgtgagctcgctacccagcccgatgttgacggtttcttggttggcggtgccagcttgaagcctgcctgtaagttcttagcacctgcccatctaccgatttgttcaccaaattggtactaaccaacttctacagtcgtcgacatcatcaacgcccgcatctaagggatttccgaaagaaaccaatacccccatagtgcccctatcatcagagcaaaaagctctgtgatgtaggcgtcagaagataacagcttggaaattccaggaaattatcacgaatctatgtacatttctgaagtatatttcgataacacataatcgttgctacccagcggagcagttatttccttagccaaacagactgcccaatgatatgcgcctagacaacacatgtaacctatgaagaatacaacaccgagaccccaaccccccgccaatacgacatgccaggacccccacctccactctgggccgagccggtggccgaaaccgaagaagcagaaggcgacaatgagaaggaacccggacctagcccaacacccgcgctcactagaagctccttaacacggccttcccagagaagccgcacattccaagattggtcaatgcgcagcttaatgacagaatcacttgtctcggcctcgccgtgagcgttggagcctacggggccttcaggttgagccgggtccgctagaagcggggaagccggtgagccaggcagggaaacgctgaagtcatgcatgcgtactttgcggcgggcccattcgagatcgtcgtgactgggggagctgggattcttggattgacgccatagctcgcagccggcgaccatttcactttcccagctgtagacgttaaagccgaaacgagagctgaaggcaaggttaggcgaggcgcggagggaatatgttgtagataaagagcccacaatcggggccaatgttagtgttagagtgtaggggaaggtcgatataggtgtccgggtgctggaatgtgatgatgatggcaggacctttgtggctgcgggtaatgtggtgaatcgcaggccggttgacatgccaatcagtgatgatatcggggaatagtacgcctctgcacctgcggacaggagggacgatggcggcgggacgtcgtcgtgaatgtatcgaggatctgggccgaagttccagagtccgcgccaaccgaacagggcgttgtctgtgctgaagaggtactcattgctgtacttgcccgtgtcgtgggatagctgggtgagcattgaggcctgtggagcggacttggattgcggtggtccccgagttgagcagacagctagcgacagctgcatattcgtagagattctgcgtagaaagagcgcatatagagtggagggaggtggaagatggagagaagcatggagcagagtagctttacgctttgcctcgctttcttcgctattttcgctattttctccgtctttaggatttggtggttctgggtggcttccgtctgtgagcccgggaatgctaacgccgtctaagagcgagtcatatccccaggtctggattggggccgcgggggcctgcacttgacggtatcccgggcatatctttcgaagcgggattgacgcacttctgcttggtaggtcgttaaatggcacggtactaaatagatatgacacagatccatcgagcaagccaacggtgccaagtgtgtaactggtcgcgaaatggggagtggacagtgacgagaggtgaacgcgcaaccgttcgggggtcgagaagtccaggatcgctgtaacaactgtgttaggccagcaacttccatgccccatagagagactttggggggataaatcaattacatacattgagcggtggtgttgagtgacgagtacgagttgtcgcgattccagtgggtcgcctcggcgaaggacagctggatgtagtccataaagtccagcattgtccaggctcagcccttgcaggtgacaatatgactagcaccgtgaaaccaaacaagatcgttcgtagcaagcgcaattgaagacccgaccctgagagatcacagctgattgccccattcaggttagcgttggataagcccggcggtgggttaatccggttatcagcgaagaaaaaatgtctgtgggggaaacatctaaccttctgcctgaattcattgaaccaccaattccaaaatcataattcaatatgcctcgttcaaagcgtgcgcgcatcgtccacgagtccaagactgccaagaaagatcacaaggagcagacccggcgcctattcgccaatatccgggaatgtattgaagaatatgatcatctttttgtctttgcggtcgataacatgcggaacacctatttgaaggatgtgcgcactgaatttgccgatagccggtaagaatcattgctccaatcggaatttgcataagatattgaatcggaaaaagcgcttgatcaacagcggtggatccgatatcaaatatttatatgcaaatccttcaaccaaaagatcagttgtctaattatgtctttccagagttttcttcggcaagaccaaggtcatgggcaaggcccttggcgctgatgtcgaaagcgaagccgctcccaacctgcgcaaactcactcctttcctcgccggtgccgttggattgctattcacctcccgcactccggaatcagtgatcgactacttcgagaacttccgtccccaggatttcgctcgcgctggaactgaagccactcgctctttcactattcccaatggcctggtcaccgcacgggccggcgagatccctgctgagcaggacgagcctgtcagccacaccattgagcccgcgctccgcaagctcggtgtccccacccgtttggtgaagggcaaggttatgcttgagttgactgagggtcaggagggctaccccgtatgcaaagagggagaaactctggactcgcgacagactacgttgatgaagatgttcggtatcacctcgtccgagttcaaggttgacctcaaggcctactggacgcggagtactgaggaggtcaagatcctcgagactgagggtggaatggatgttgatgcatagatggggatcttcatatttttccgttttttatttcttctctttcccattcggcttccgtgtggccgaaaaaaagaactctgctgggcatcttttggagtttggtgagggcgctttctttgcaaatatattgaagacttgtgtgttttatctctctttctctcgcatccttatacaggaggctttccctcctgctggattatgagcctatgacaagattcggataccaggtcgaaaaaagtctacaaatttacctcgttcttggacatatatcaaccgtagtgcagaaccgctagctgtattgcctagactttcatctatctagcaagatacctgcctttcagtcgtttcacatggtccttacctggtcttacctgatggttcaccagattccatttttgcgcggaagaggacagaactaaaatacaatacttacccctgcagagaaaacgaaatctcataggaccaaggggaaaaaagggggaaagaaaaaaaaagcattggaaaacgagtcaagaaaacacgaagggaaataagaatagatagaacggggaatacaagcacaattcatgagaatctccgtctgccgaggagtttagatggaccaagcaggggatgtggtgaataaccactttgacatcgagttgtgatgttggtatgaggtggaaaacattgacggttgtgagcgttcgaaatgaattgcacatgggccaattcatgatttacccccttacccttgagaaagagtgatacaactgggtagatcagtgatacccaccagtacaccagcaaacccagacttcatcggaaagaggtaagacccgggggataagtgaagggtttaataccttctcctggaacgaggatcatcgtgtccaggttcatcctcacggtttcgcttgcgtccataatcctcccggccgccgtcacgaccgccgtcacgaccaccatcacggccaccgccgccatacctgtcaccacgttcaccacgttcacggtcccggtcgcggaatcggtctccgtttcggtctccagtgcctcgatctcccatgcggtcacgatcacgatctctgtaacggtcgtcacggtcatagtcgcggcggtcacggtcagcgtagctatctcgaggccgcacaggctccgaattgctgccagttgcaccacggtcgaatctgccaccggcgccaccaccgcggtcaccacgatcaccaccgaagctaccacctctgaaacctccgctacgtccaccgccagggccggagggcgcgttagggggagcctgtccaccgaagccgccacggttgccctggtatccgataccaccgcgaggaccaccgaagcgatcattgccaccgcggaaacctccaccacggaaaccaccacctccacctctgcccccgaagcctccgcggaatccgcctccatacccacccggtccagatggtgcgttgaaaccaggtccaccacgggggagttgcgcaaccttggtgtatccgcgccctccgagaccgccaccaaggcgacggggcttccaccccttggtggtgcggccacgctcgacatctaccacaactggtcgtcccttgatactgaagttctctgtgtctttgtaggccgctgatattgatgaaggaactggggtcagcaacatttcttaccgcaagacgaattaaacgggtgggttggatgccaagtaaattgccatggttgtgatacctttcatatccttctcgcgctcgaacacgacaaatgcatagcctctgtggggtttctttttcttgtctgatactgtatctttgatgatggtaatctggaatcacaaagttagagctgtttatattcacaagggataaggaaaacaagacatactctttcaatgggaccaaatcggccaaactctcgttccaggtcagcttctttggcttcataactgaggcgtgagacaaagatagtcctgaatgggtcgcctcgagcttgaggatctttatccggattgtctgtaagacatagccacgttagcctcttgaaataatgtgaaatgtgaaaagaggataaagcgtacagttttgcagtccatccgctatctgcttctctaactgctctttcttctcgactttctcgcgcaatttgcgctgcaccccgctttcagttgcgttgtagggaacttcatcggcaaaagttttagcatcggcaaggaactgggcaaccccagagatagtgctcttctggcagtcatctggtgcgcgatcgcctggaggcagatatcgaaggggtggacgcggctggaacagcgccagaagtggcgggggtagcttatccgtcatactgagtgtgaaaccaatgcagataaagtggggatgtgaagtaaagacgatatgtggaagatgagtgaaacctcaggagtcagagcttcgtgtcgcagttgtggtcttagcgggtcgaatgatcaaagtgctgcacacgccattggtagcgtgactcaccgcccttaccaatcacgtgcaccagaaaatgccccgagagccatcgcgacttgtaaactccggctataactattgacgactggaaagatgccgttgcgcggaattagaacatctacggcggccagggtatgtgaagtccgaatgtttgatattcaattgacgaactgacccaaatctgcttagaacggcgccggtgccttcatcctacaatgcaaacgccttgacttccattactgcaactgggcgggcagctcaaagggcatggtgtaggtgtatcctaaatggtgaaactgaaactttccagaaacatccgtactaacattgaacatcgcagtactttcttagagaaacacctccccgctttcgcccgcgagaaccctcagattgaaatccgtgtctctccccgaccccagaagcaccccctgattaagggcctttatatcaatggccgtgagaagcccgtgtgtgtacggaacttggaacctcacgaaatcctgaagaaggcaattctcctcaaagaagctagtggagagaagttgaagcgggtcaagaagccagtcacaagtttgaatgagagtgtgcgtggtatctggtcaccataccacggtgatcttcggggagtctagacggttgtattttattatttacggttcatgttctctctgcggtggtgactatcaggtatccccactgcaacctactgtactattgacctgggttgtgtttatttcttcgttcttgtctatttgctccctggaagccaatggtgttttgaaacccatattttatgcatacaaaacttgagcctatatcaattctcttccatgatttctctataccggaggtcaccgaaagtttggcttaactccggactccgggatacttctttcatccaaatccgatggtcacatatcttattagcctgatttggatttgaaagcatacatacgtgcctaacaaggctggtgttggctagcttattgcatggttcgcaatctacttgaccgggggctcggcttttgccagtgttcgcccatcccctagttttctacctgcgtaatcctcttccctcactctcatatttcatatttcatctgagcgccttacttgcgaaaaagtgaagatgcagtgtggcatttctgccgacactcactttggaccccgagtgctgccatgccgtcgcgatttcgactttacgttgctcttcgagcagggcattctcgctttggctccgcatcttttattcctcactctgtgcattttcagtggtatcatttccacagagagcccaggaaagtacacgtagtgctgctggcacttggaaagtggtaggtctcccttttccttagctccgaaattaggcttgcaagctaatgtgatattgaaatatcaagcaggtcatttccactctactactagctccgaaacttgttctcctcgtttgtggtgtttaccaaactctccaagaacaaagctctcggttccgtctcaaagaaaggaactaatcgaaatatagtgagcgtactaggatcatcctatatcgcccctcaaatgcgccaaaagcaaaaggcttgggtacatgctgttcaggagagagtcaattttacttcgataatgctgaaagagctgcgccagatcaaaatgttcggtattgaatcagacgtggcattcaagacaaacggtcttcgtgagttggaactccatcaatcaaagccctaccgatcaatgattgtcggtgtcaatgttttgagtgcgttgtcgactgccatcgcccctgccctaacaatagccatgtacgccactacacagctgaacctcaggctagagacacccagtactgatgttgccttcacaaatctgtccttaatttctcttttgacaaacccggtagtactactatctgtctccttgactagattcacatccgctattggctgttttgatcggattcaagaatttttttgcaagaaaaaccgagtacatgggctctcatctgtcgatgaatacttgctgcctgagaacgtgttagggatggaacccgaatcagtgccgactcagtcacaacctcttgtctgcatgactgattgctgctttagcctgggcttagaggctccagcaatactccatggactaactttgaagatccaaaatggtttttttttggctgtgactgccccccttggctctggcaagtcatctttactcaaagatatgctgggtgaaatgcattctacggaaggaatattgactgttcgttcggtcaaacaggcgtattgccagcaagctccatggatattcaatggcacactaagaactaacactatcggagaatcaccactcgacgaaacgtggttcaaagaggtggtatatgtctgcaacctggattttgaaaccacaactctttctcttggacttgacacactgactgggagctcgggagctgaacttagtggagggcagaagcaacgagtggtaagtatatcggtaatctcattccatcttaggtactaatttgcgtgagttcaggctttggctagagcaatttatgcaagatcatctttgctgattttagacgacatatttggcgccttggacacagtgacatcaaggctaattttccagcgactcctcgatcgtgctggcttggtcaggaggctgggtatcgcaaccattcttgtgacaacagctggttagtctaacttgaacccttcaaatgcttacggcgctgaccattgcctttatttcactagtggaacacctcaaagaagccgataatttgattgttctttcaaaggacggtcgcatggaatgtcaaggacttttcgaagaactggcgaagaagaatcagtacatacagagtcttttgtgttccccaagtccggaagacagtgaagtcgaagaagagagcaaggacagtaactcccaggtgggggaaatacgagaagagaagaaagaaaccagacaaacaactcaaacaaagaccgtttccaaaatctccagggtgatggggacacctcactctacacgtttggttggtgggcatgtgggctaacgctggcattcacaattctatacgtgttttgtattgcatttccgcgtgagtatacccatcactggatatattcagagacattgttcctaaatcatatcgcagaggtcatgcttagctggtggtgtgactcagctcctccaaaaaaattatatttatcttggttcctacgtcggcatttcttccatcgccatagttgcgatgggggtttttatcgggtatgttctcagcactgcgacgctatatatgtatggagacatctcatatatcttaggttcttttttgtctggactgttcccagatcggctgttaagctgcatgaggtcttcttgggtacaataatgaggtcaggaatggggacagactccttttatattagactgaatatgttgctgacgagcttttcagatcgccttggccgagcctggctcgcatatatacaggaagtttgataaatagataagccatataattgagactcaacgttgtgatttcatcgaaattaacctgaaaaattctaaacatctccagatttagccaagacatgtctcttctcgacatgcagcttcctgttgcttttggcataactccccagagagcgaatcttcgttccccagcattcacaaattgttaaatactgactttctatcgagtaggctttttgacctgtattgcacaaggggacttgatcgctactggatcaggcttcatgtctgtcataatacccttctgcatcgttgcggtatggataattcaggctttctacttgcgtacttcacgacagatcagacttctcgatctagaagcaaaggctcctctgtatgcccacttcatagaaacgacagagggtctaactactgtgcgtgcactttgttggcagcgtcaatttgcagatcggaacaccgagctcctcgatacgtcccagaaaccattttacaccatgtattccattcagcagtggttgcaggttgttttggatctacttgttgcgggccttgccaccgttcttgtttccctagctgtttttgtgacaaagcaaagtagctctggggccgtcgttgtgaacttatttcattcaactcaactttgacattgttgattactaattggacacagcttgagacttctctaggcgcaattgcaagggtcaagcaatttgtgactgacccacagctacaacctattgccagaagagagatggcttatctcaagcgctggccttcggaaggtcgaatggaatttcgaagggtttctgcttcatatgggtaagtgtctctttcagcatcactctgttacgcaaatagaaatgaaccaaaggactaagattgctattagggggcatgattccgttccagctgtgcgggatatctcatttacactggaaggtaaggatggataagctttatgaatgaggcataagtgataagttgaatagtgggaagagttctttacttgcttgcattttctctctcgcgacgatcacgtccggcgaaatctacattgacggcattgacatctcaaccgttcccaaggaaaagcttcattctgcattggtcccaatatcccaaaatcccaaaatcccctgattcttcccggttctgttcgccaaaatatttccttgggaatatcatcaacgattgatgactcggagatgatttctgtcctggagggagtctaaatttggaatcagattcgtgacaatggtggcctgagtgcgagcattgattcaactcatctgtcaaatggacaaaaacagatcttctgcattgcccgtgctattttatcacctggtagaattatcatcatgaatgagcctacgggcgggcttgatgagcacaccgagagattagccacagagcttcttcgtgaacggctgataggacgcactatcatttcaattgctcatcaaatcaatactgtgatggactcggacttggtgatggtaatagatcaaggtacagtatctgaaatgggagaaccgcaagaacttttgagtaggaaaggcatgttttggcagttgttccggggcataaaaggtgtctaaattgaagtcagccagcgagaatccgttcaaatagtcttctaagaaccacaaggagctccaccgcaggttccacaacgggccgtcccgcacaattatgtccacaccgaatcaagaaccgttggatatttttcgggctcactagacagatttctctaatccacattgacccaaatcaatcgcatcatactatacttgtgatttaggttgattggttttgatagcagctacaggattggtaggaatgtgtctctgccatgtggccctagcatcatatatatcttagcaaatcttcaatgccaccgtcttagtctgagttaaacgtggcataagaaatctgtataagcattcttttgtaggaagctctttattaggcttcaatcatgcacaggggctgtctcacctagtacggcaatgagttagcggcattaacggtcacttgcattacccactacttcacctatagtcacagtaaaaacaaaagaaaagtaaccatgcaagctcgctattacccgtagagctgacactattgagtctaggcgctaggttaaactcttgggcgaatcggctagggatacttgcacaatgtaataaaatatacgaagagggacggagagtacctgcacgtgctaaatagaggagattagttgaccattccctcccttttctttctttactttttggctatcgtgttcaagtcgtgcctagcagttctaaataaaacattaaatcaaatctcaatattgtttgcactcttatctctctctctcttgtggaagtccacaagtcagagtctatgaatatccttgccaccccacgacaggatgaacagaaaagggagatactctggtcggattggtggaaactgagggggcgggatttcgcccgagtcaacacccttgacatattcaacccctgaattatttgtcccgcacatcagttgttctcacttttactactccgtatgttgtacctatcttgatctgagagctcgccgaagcctattccaccatgtctcatatcataaactccttccagcaactagaaaaggttcgtaccttcttttgattccctgcatgggtttatgtcgttatatggtggctgtgaaatttaagaaggtaccttaaaaaggataggttgagttgaccccgctgattttggtcacagttgggtgaaggcacctatgcaacggttggtatccccgagaagagtttcagtctttctgcaagaataccattcatgataagactaggtctacaaaggtcggaacaaccagaccaatgagctggtggccctgaaagagattcatctcgatgccgatgaagggacgccgtcgactgcgatccgtgagatctccctgatgaaggagcttcaccatgagaatatcctggccctgtatgacgtggttcatactggcgaaaatctcgtgatagtgtcggaatacatggacaaggacctgaagcgctttatggacgaccgcggtggcgctcttgatctccccaccctcaagttcttcgcataccaaatgctgcgaggcatagcctactgtcacgagaatagcatcttgcaccgggatcttaagcctcaaaatctgcttattagccgggatggagatctgaagttggcagattttggtctcgcccgtgcctttaatatccccatcaacactttctcaaatgaggtggtcaccctctggtacagacctccggatgtgctcttgggaagccgctcttacgacaccagcctcgatctttggtcagcgggttgcatcatcgccgagatgtataccggtcggccgttgttttcgggaaacgcgaacaatgatcagctgctcaaaatctttcaagtgatgggcaccccgtctgaacgcacttggccgggtatcagccagttgccagaattcaagcccaattttcctatctacctgagtcaagacctgcgactcctgatccccaggatggatcctctcggggctgatctgctcgagcgcatgctgcaattgcaacctgagctacggatcagcgccgctgatgcgctacgccattcatggtttgacaatcttgtttctgagacagggctatcaacacgcaacgttcctatgattgtttagatttccaatgctgctaggtacaggagaacatggtgaacccataataaagagtgagggcattacgacgtcaggaccatcatcaaggacagggggaaaccaggcttgccctgagtgtatctacaattgaacactcgagacatgaaacgcaatcttcatacaactgaaggctgatattgatacttctcatccaatatcttcccaaagaattgtacactcttgccagccaacataatatacttcatatatctagttcctagatcataatgtcgagggccacggtgcctggctgatattctgaaggtattaattagtctcacggtcgatcttggatacttagcaagagtaatcatgtttaccaggcagcctgagaactagaatacattgcaatctaccatgagtttcagtacaacatccattggacaatatttataatattctgcatatgataggctacgaaaccaccggggtcataacgccatcataagtcactgaatcgtaatttggatataaatcattatttaaaaacgcctgccagttcaaatgcatcttgggtatcgacggaatgaggaaaggagatggccataacaacagaatgcaaatgaatgcccgcaaaatcaatgcccagggtaaatcacagataaaggtggtacatagccgtcgggctacttacaggtttattacaacctgcaacttggcaccttgagaacggctttgtctttgaagctgcctttttagactttgagatggaccgattcccagcgcattcgccacaatatacctgacaaaattgttagtctttgtcacggactcatcagctcaaaatggacaatactcacatggccacatggttttgcaatatgaatctgttgttttagcccctctccggttcccaactcgtcctggcagttcggacagataggcacgtcatcttctgccaaaaggcgagtgaatccttcgggtgctggacttagtcctttatatgatgatcgaggctggggcgccggctgaataggcggataaagaaccgcagagtgaagcaaccccaagtcactcatgccattggcacgatagccggaccatgtcccatcggatcttctcggccggcgtgtatgaggagggaagtgcattggtattggaatgccattggtgtcgaagtacctgggttctattggtctcggcctgagggtagaagacccaacaaactgaacatctccactgcccggcgagacctccgcttccagatcgattacagcaggacgatcagccatggtggacgtgtggttcatcaaatctcccggaaatcgtaatggacggggggatgtgaagggaccgaatattgatgtcacattccgatggggaggagagtctgggtcgtttgtcaagtcgatcacggcattatctccaggtgaaagcatcaccggccgtcggtagtcgaatccatctctatctcttctgggtggcaaccgggaatcagatcgagcgtggtcggagcgacgtgggtgaaagtgctgttcccaagcggcatcaccgcttccatcatcttctgtggccatctcacgatgtcttcgctgagagagaaagaaatcttgttagctaggttcttaatgatctgatcgggtgccccgcccgtttcacgacggatgaaggcttaccttggttctggcgcccataaactggacgccagagttttcactcatttcagggcctattcctgaagtcaaggaatggtattttgcagagaaaggagaaattgaaagccaccagggaggtgagagagcaagattggaatccatctttgtgtctaggccgagtcgcaaggcggtgaacttgtgccaatgttataaggcggtgtcttgattagtgagctttgaggttgagggccgggaacgcattccagaattgacaagacgaactggctctagcaacagatatttaactcatttctgtagggctttgttgctgtctactattagtattccacaccaagtttcatataaagattggaccaaatgaaaggtatgaattcacgatgaaatctttcattcatctctaaatttacctgtgaaccttggaatatcatctgtgaataccatctgtgaatatcatcgcaccaagagctttcaaatcaaacaccatggaaaattcagaaggtcgcatgctctaatattacagtattttcctggtgatcatgactgtgcctctagcactgtgatcacacccgcctcattcaacgtcacaatactctgagcagctgatccccaagcaaccgaggtagcagggaccgcactccgcagaggctctgaccaccccttggaggcctttgagtattgctggacagttactccgctgggcccaccagtcaagaggaattggccagtataatcccagaagattgagtctatctggcttcctgtgtccggtaccttggtctccttggagctgcggagatcccagattgatacagtggtggactgcgcggctaccgcagccaggtaagtaccgttctcagagaagaacagacatttcactgggcccgacatcgtatagtccgcagcagcggcgccggtcttgacatcgaagatcttgacttttccgtctgcgccaccggccgcgatcaagtgaccatctgggtggaagttgacagacagtagagctgaacaaaagtgattagcatcgcgcttggatatatgagttccataggttgacttcttacctgcatcgcagaaaatttgggagaccacggtgttggtggcgagatcataaagcacataactcttatcgacaccaacagaagcagcaatatcaccagtagcgtggactgtgacagccgtcacctcaccagagtgggaggcgaagcttgcaacttcagcgccattctcaaagaccttgacggagcccgtagaggaggcaacgacggccttgtttcctgcccatgtcgcatcggtgactgggccatctgtcttgagggtctgtacgacactcttctgggagagcgagtagacaccagccacgccgtcaacaccaccaacaagagccaggtcaccagtcgggttgatagataacgcgcggccaccggggtagagaggttccgagacctgagatggcttaaatgtggaaatagcctcacttgaggcccagccctcggggactgcgcgcttacgtcgggtctttgatagtctgtccaataattagtcgtctatccagaaatgcgatggagaagcaccgaattcacgtacgctgcctgtgtgttctcaattcgctccaacactgcttggggcaggcccgtggagtccacttgcatagcctctcctccggcgcgagtggtaccaacagaaacgttcgaaagtgcctcgcgggcctcgtccctctcctgcgtcaggcgcgcaatcacccgcaccgcggcatcatgctgatagagtgccgaacttagctcgcgccttgtctgtgccaaattctgctgcaaagtgaaggtctccagggccaaggcatcccactcttcttgaaaaacgctgagcagagacgggatggatgtaagagtagggggtcgaggtcggacaacgcgttgcgacttgagatcgatcaaatcgtcggtggtaagctcctcgccgttcacgggatctttgccatgctcggcaatgtatgcttcaataaggcgcttttcaaatacgctgcctatttaattatgagattgatgtcgtgcgcgcaaggtgatttcgaagacttaccgctcttggtagagacgacgggcacttgaggtgcttctccggagactgtgagaaaggtttagtgaggaactcgcttgaaagaagagcacaaaattgcgattcatagtaggctactcactagcacaaagcatagttaattggtattggttgatgagggttgatggacaggacttgacgcgaaacggctccttggacttttcgatgtgtcctattatggtttagcgtcttgagctgagggcggtgtagtagggcggaatattgcgaccagcagtgacgtaagtccggcgaattttgaccggcagaaaagtacagtccttcccgtgataggtacggcgtagaggggccagagaaataggcggtgaggcttaggaatgtatggtcgcggtagcccgccgtagaccagcagctatcgactttcacaattctccaattctcgcttttgcatatagagataacttatctttctatttcgattgaacaaaatggatttccctcgatgatctacagaataggcaaagggcacgagtacaaagcttcacttgaaagctagcaagcgaatacagcgagcgcattcccatcatgcctaagaacccaaagtttgaatatggtatgtcgctttgcacctctctaacatacctatttgattctaacctgttatgcagatgcaaagcagcctgcatttctgcagaagctccggggccagtatggagacggcactggtcgcttggagcggccagccttacgaccgaccagactcaaggtcaataatgacgacgacgatgacgagcctacctacctcgacgaagaaagtaacgaagtgatttccaaggaggaatacaaggcattggttggtgaaagtggtccgaaaggagaggacgaggccggcgaatcagcgaaggacaaatccactggcgatcaagacaaatcccaaacagaagtttctaccaacaaacagaacaatctcactgaggttggaggtcagaggaaacggaaaaaggccaaagtggtgggtgaggacaatgccgaggccgaagaagtccttcccaaggcaacttcgaagaaatccaagaaacccaagaagatcaagctctcgttcgacgaggaatgagagtccagcaaggctgagaactagagtattcctttgcgccacgtcgtgggtggttgactcagtgtaaagcatcgaggactcataatgagtcaatagaacggattacacaacggggattgtataccgtcataggattagagactgtcaaagtcaaagtcatatagaagaatacatactaatgccagtattcagtctataagataaaaatccatccagttcaaaataataattcaagtgctataaaaggtctgggccaagggcgcatctttatccgcaactttttttgcaacttttttttctctctcacgggatccagtcgccttccattctttttacaaacaacctgctcttggtctcagtatcagtcaagatgcctgttgtaaatgtcgaccagctggtccgcctacagcggaagcccgaggacataagaaatgtgcgtgtgcccctccatcccactcatatcagggctttatactaatctcagccaccagatctgcattttggcccacgttgtaagtcaaagaaatttacactttcgttccaaatgagcctaaaatgctcatcgcgctttcttttgcatttttaggatcatggcaagacatctttgacggatagtcttattgccacaaatggcatcatttcacccaagctggccggtaaaatccgctacctagactctcgcccagatgagcagcttcgaggtattacaatggagtcatcagctatctcactgttcttctcgatgctccgccgtccaagcccggacgcagagccagtgaccaaagagtatctgatcaatctgatcgattcacctggtcatatcgatttcagcagcgaggtctccaccgcatctcgtctttgtgacggtgcagttgtgctcgttgacgcagttgaaggtgtttgcagtcaaaccgtgacagttttgcgacagacctgggttgagcagttaaaaccgatcttagtcattaacaagatggaccgcttggtaacagagctgaagatgagcccggccgaggctttctcgcatcttagtcgactgttggaacaggttaatgctgtcatcggtagtttctaccagggcgagcgcatggaagaagatctgcagtggcgtgagcgtatggaagatcgtgtcaatgctgcagcggctcgggaccaagacaacaaaaagacatcagctgacgatgagtctgcacaaagcatcactgagggaactgaatttgaggagcgcgacgacgaggatctttatttcgcacctgagaaaaataacgtcatcttctgcagtgccgttgatggctgggctttcacaatccggcaattcgccgccatttacgagaagaaactcggaatcaaacgaacagttctggagaaagtcctttggggtgattattatttagaccctaaaactaaacgcgtcttgggtgtgaagcatctgagaggacgtgctttaaagcctatgttcgttcaattggtcttggatagcatttgggccgcttatcaagccaccacaggtggtgacaagggcaaagggtaagttgaaaacgaacccaactatcgcgtcaacgctgatatgatattgacctttactagtgacccagtgttgctggagaagattaccaaatcgctcaacattaacatcccggtatatgtcttgcgcggacgcgaccctaggaacattatgaatacactattctctcagtggctgccactatctactgccttgctggtttccgtcattgaatatctccccagtccgcccgttgcgcaagctgcccgactacctgaaatgatcaaaaagtcccctggcgctgctttcattgccgacgatatcaagaccgccatggtggaattcaagacaggacctgaacagcccgtcgtggcatacgtcagcaagatggttgccatcccggagagcgagcttctgtctaatagaaagcgtagcgaaggcgccatgactgcagacgaagctcggcaaattgcgcgtcgcaagcgggaggagattgcaaagatgcaggcggaagcccgcagtaatggagaagcagatgactttgatcgtatgacatcgatttttgaaaccacctcattgatcactgagacgactgaggagccagaagagccagtggataaggaggaccctgatcatcttattggtttcgcccgacttttctccggaacgctttcggttggagatgagatctatgtcctcccgcccaagttctctccagccaatccgcacgccagcccggagccaaagaaagtcatagtcacagacctgtacctgatgatgggcagagccctcgagcccctcaaatccgtaccagccggtgtggtattcggaattggaggtcttgcaggccatgtgttgaagacaggcaccctctgcagccgacttgatggaggtatcaacttggccggtgtttcgctgagcatgccgcccattgtccgagtcgcgctagaaccggtcaacccagcagatctaagcaaactagtcaccggcttgcgcttgcttgaacagagtgatccatgtgcgcagtacgaagtgctgccgagtggtgaacacgttatcctcacagcaggtgaactgcacttggagcgttgtgtgacggatctgcgcgagcgtttcgcccgttgcgagatccagactggtgaggccatcgtcccctaccgtgaaactattgttcacggccccgagatggctgcacccaagaaccccgacctaggacgtggagccgttgtgacggtctctgcttcgaagcaaatgacccttcgtctgcgcgtggttccgatgccagatgctgtcacggaattcctgactaaacaggtcggaactatcaagcaactccaattggagaagcgctcagaagctgaaggcaagatagagaccgagaacgcagccgaagctgccgttgacggtactggcgaggcgcctgaaggcaacattctctccaagcaggagttccgcgaaggtctagagaagttgttcaacgacgaggtcaaggaagacaaggagctatggaagaacgtcgtcgaccgaattaccgctttcgggccccgcagagtcgggcccaacattctagttgatgcaactgcagtcaacacatgcgaaaaattgtgagtataggttaaaagaaacactatatctatcatttagatctaacatctccttcctagcttggtcgatgacaccaagcaacagatcgacggtgataaccaccaggcactggtcgtgcgcgatttcaacgacaagatcgcgtatgccttccagctcgcaacaggccaaggtcccttgtgccaggagcctatgcaaggcgtggccgtgttcttggaagacttatctgtgcagtctagcgcaggtgacgagcttgacatgggccggttgacaggcgagtcaatcagactggtacgtgaaggtatctcggccggtttcctggactggagtcctcgtatcatgctcgcaatgtacagttgcgagatccaagcgaccagtgagtatttcattcttcccttctgttcatgccttcacaccacacgcgccacacgcgaaaagcaaacccacagctaacacatcatcttcacccttaaagccgaagtcctaggccgcgtctacgccgtaatcacgcgccgccgaggccgcattctctccgaaataatgaaagaaggcacgccattcttcacgatcctggcgcttctacccgtagccgagtcgttcgggttcgccgaggagatccgaaagaggacgtccggtgctgcgcaaccgcaactgatcttcgcaggcttcgaggctctcgacgaggatcctttctgggttcctgctacagaggaagaacttgaagatctgggtgagcttgcggataaacagaacgttgctaagcggtatatggatgctgtgcgcaatcgcaagggtttggttgttcagggacgcaagttgattgatgcagagaagcagaagactctgaagaaataaggccggggtactatttactctggtagagtccaaaatggaagatttatttgcatttcatttggggcttttttgtaggatggacatggatgatatatggattggggatgttactccgaaaacatctgtcgagtcgcactgagtagacttggacacgacagatgaaaaattggaggttcacagaagatgagagtcctccgcgtgttcttcaaagaaaaacatcaatctccctcacttgacaaacacagtccgacatggcataggtctcgaccgtgtatactaaggagggttacccaatagggtctacgagtagtggcgttgacgcctctctacttagaaagaagaggaaggagaaaagcgacgacaggatgggagcctgcagtcgagagtcgaaggaaaggaagggcggaaatgacatagatttctcaatcatgtctccgttgggtatctttattctgaaatcgttatcaatgtcaataatacacatatctgtgagtgcacagtggcgtaattggatcgattcaaacggggaaaggggagcttttcccacttcgtgaaacatgaaagtcgtcatgatcaacccgggtgctgctgcttgagagcatggaacaagtgtgggggtttgaaaggcattcctcgcagtgaaggttgggagtgaatttttgctgaaaaccatggatcccggaggtagaaagacaatgctctcaggggatgagcagatctgccacggacatctgggtggacgggagcagattctgcttgattgttgtaagctgaaccactgtgtggccagttgacagtagaggaaagggtcatagccattggacattcaaagagaaagccaaaagccagacaaggaggggaccaagttcgaacaattacatgttcagaacggcctggcgaccttcctctgctcactagttccagtgacaggatctctcatttccttccagctgacagggaacatcatgttgccagcgtcactgcgagccatgacaacaccgagatcattgcgtgcagtagtgatgtagtaaaagctctgatcgccaagcgagataacggagccgcgaacgatatcgccgacacggaacatctcatccataacgacacggtccttctcaacagcccgtacatcctctttccggataagtgcctggaagcgcagttcgtcggtgctgctgtggttttctgggttggcagcagatgtgaggatggaggcgacattgtcattgtctgaggccgttggtgattggccttgagattgtgctgctgattcgtcgaggacgacgaggatagaaactgtagcttgtcgcttctgtacacgggtcactcgtgcaagaacgatggagtctaccgcggggagggtgttatagcgaggtttcgacgcgattgagggtacgacgacgggaccagccggggttgagcctgcttggtctttggaatatatcactcgtgaaactctgagggtcggtcttgtttgtgacttcggctgtgcagggtccgcaatcacaggaccggcgatggaggcgtagatgaaggattgctgaacgtgtgtgccgggacctgcagaatatgtggataaagggccgaggcgttgcccaggaatagcaataggtggtagagaagccatcttgcaaaactggagttgggccaattctgaggtaaaaaaggtctggagtttgcaaaggcagcgagttttctggagcttttttaggagctataatacggcccgggtttaggttattccgataccagcttatccgcatcgactacggagcacagctgtacattcaaacactatgaactacattattcaattacaacttgtcaatgaaattctgtctgcggggaattaattacagagcctatatctagcatgaaatgaataaacaatgtacgcttcggaacaacggcaccggcccagaaataccatggacatataacaacagaagagataaaagtccgtatcactccgaatgcccactgacgaagacgaataagtggctttaatatcatccaactaacggtttttgtacgttgtagggatatagtctggcagattagggaggtctacccatcataggaagcacgtttttgcgcgaaacaatcctaaccgcgaatgggatgatatgaattatgccaaataccaactagtcaagccatctaacatagactagaaggatatcactcgatgggagtggtgaagcaccactcggtggcagggtcaaccaaggaaatgtaacgagccagtgtgatatatgtgatacaagttgaacatctttggtctcatttcctttgcctttgctgattgatcatgcgctcgatttcggtggctgcggggccagatgctttagtgcggaggagttccagggtgttaaggtccttagtcttttgtgcttcttctccggccttcacaatcatgccgcacttcacccacatctcaattctctcagcggggggcaagtggctgcactttggcacgaatcccgaagcaagttttgtgtttccagcacccaaaatctcgttatagaaaggctgtcttgtgtgagcgtatattcagtagttaggattattgactgtcttacctcccatccgattggggatttcttgagtttagcgatttcctccagttcgccccagtcacgcttagccaccaaagctctcagtctcaaccaccagaaagttttttcaggcattttgaattcattttggatcttgtgtgctcttttaccgtaaccacctcggataagtctgtagactgtctcgttgacactaaggccaaggaactcgctgtggtctgccaagtctttatccaatgcgtcttgggctttcaaaagctgggaggcctcagagactagtttttggttaagtaccactgtcggttccttagaatcagacaagaggcgagatgctagctggagtttttcggttcgtcgtgtcagatctgtatctcgtaaagcttctgacaatagtacattagcgccatcaatgggtcgatcgtcttggtagaacaggtctttcagtagctcgatgtcatctcctcgtgcagcagtttcaacaagtgcggaagccattgggcgggtgttgatcattcggaagaagcttgctaaaggaagcttgctcttcagatgcagaagcacgtagttcaccaagtcatcatcaccactctcaattgccttgtcaagagcaagctcatcttcctccatattcaaaagcagaggtacttgcttgccggcccgtggctcatgattgagcaattgggtagccaggtgagatcgaccctcgtcataagcagcttgagcgataacctcaaacgagattcctggcttcccatcgagtctttggacaataagcttgcatacagcttcgtcatcaacggtcgacaccttcaccttttggcttgcccagtggacatagattttgtctgcgggaatctgtaggtattccgaaatccttattgcaagcagatattcatgtcggctgattaagcgttcgatgagtccttcgggtgtgaggcgcaggtattgttcgtatgataatggtagcccgatcttatagtctcttgatgctttgagaacgcgtagcttttcagtcatctcaacaaactcatcactgttgtacagctcgaggacggatttgccaaacgaggcagctttcagcaggcgtttctgccagtaggcgtcgaattcatggcctgctgctttaatgcaagtgtcaactgctgatggtaaactcgaccggatgcgctgaatgttctcatcagccttgggcgattttttctccagttgctctacagaatccagtagtacggaagcgggagaagacgacccaagacggaatatttcttcggtaacagctggaaattgtcaatgacagtctgcctgtctccttttgatgtcaacttacctgcgaccttatgcacgaattcgcatgtgtcattagttatgagccgaaccccatcaaactctggtatgacatgaacgcggccatcgtagtagtatctaaaatgattagaggcgttcgtatatattacacaaaagagaccacttactttgatgcgactccgttgggcccaacaagatgaatttcatcttcccatccaaggatgacagcatcctcgccacaccaattcacggtatttggaggaacccgagattttgaatcgtactcgctgaacttgttctggaagtcattgctgactacccataacctcccttctgcggtgaaaagtgcgacaaagcgccctgtgggggacacactaatgtgtttgaatggaccatcttgcagaatcttgtcttctgcttccgttgagtcgattaaaaatacggtcttgtcgacagccaacagaacctcaacggatcgtgagagtgtatgggctggtggaattaaagcccatgatgatacctcgccttcaggacaaggtgccaagagtcgcgggcgcggctcatcatatttagacacggcaattagctggttattggacagcaatgcaacaaggcctgatgaccaaaactggcaggctctcacgccatactcttcggcgccctattgaattgttagtttgtgcacagtatagctagggtaggcagtcctaagtctaacatttccgagagaaaaggatgtaaactcgccgtccaatccgaagtagcgtcgcactgttccgtcctcagagacgaccaggagctcttccttgtcagaccagcctagtccgcgaatagttgcttgttcccactgacacaatttagtatattcatcatacatcaatcataaagtgcaaacaaacgtttatacgattgattttccgcccagagcatgaataaatatcaatggtggaacgggagccctgtccatcgcgaagtctgaatgtcttactttcgtcgcgatagagcgctgattttcacgttagtctagatcttcggttctctaatagagacttaccaatagctcctccgtagggggcgcccacgacaatgtagttctctaactcgatgtcgtcctcgaagatggcgtcatacacggcgattttgcgataaaagctgtctccaactttttcccagtttgcgagtggattgggtggcatgactgtagatctgatcacagatgaggcagtgaatcctctctacctgggttgttggatgttccagctgttgatccggagaatgggtcgcgcacgctaggcccgatcgggtggtgttgtggccttgattatcaggcggagattccccaccacagtcctcaacttctcttgatacttgctccatcttcattggccaacttggtcctcttcttaacatatggattatacagatcttgctgatattgctgatattgctcaacaactatctgaccttgaagtggcccttttactatgccttgttgcccgcgaacattgcttgatcgagaccaccagccactgtattaatgaccttgccaaagaactcgccttagtatgtctatgcacccgggatattgggatggtatctgatgaaagacagattggctcaactacattcaattactcatactgcatccttgactgttcaactgcaacatctattgacgacgtctttaatgacgttctcaccccggatgcacgcgcaaactatcgcccatcgcgtcagtggttgaacaccgaatcagtatgttgatattttgaatgctttttgctatggatatcgttgtatagactaatcaaattagtcaagcaaacgttcttcctataagagccttggggattacagcaaattaactccattttcacaactcggcagtaacgttgtcaatattgtggtcgccaaaaacttcaattttgtcagcgatgatatccaaatgcacatgctgcaggtatctattctgactagcagctcaatggagccgatgctgatatttgcgatagttaatgcgatcgaaggagttggtcaccgagaacgggaccctgagtgcgcctgaggacttcctcttcattcctcttgtggcacgagatttcgatcagctccggccatctttgaaactacatctggtaagtattatttgtgcgtgtccgcattttgactgctttactttagctaatgccgcagtagaatgacaatctcttcatttctcatttccacagcccggatgttggatatacctatcttgaagagaatgactggctttcagatggacaaatgtcggcttcctctgtcattcataattcaaaaggcaagcaaacgaagagcgctacagtcagtccgttggtaagtttgatgatttagaatacgaactgaacatagaaatcgaatactgggctcatgaacttacaggtggtgggtcaacttcgagaaacaagtgcgtcggtgagcacgagcgcggaagtcgttcgatacatccaggatatcgttgtatttctgcggctcagtcgcgctgttgcaggtggtgtgtctgcgaatgcaaatattcatttttctcgatttgcacagtgagttcgaatgtttccaccaccacctattacatctagcttatcttactggttctcctctgcagacttctagctcctctgcatggtatcgattatttgactccctccatcgtggccctagccgccaggaaagtctttcgccatcgcattattgtcactcctcctggcgaagaccgcagtctacagtatgggagtaatttacgtgcggtagctgatattctcgttgatgtgacaccggattcgatactagatggagttctggcgctggagccgcctttatgagattataatgcacctgcttagccattctagattactgcattagatacccaatcaatatagattcccaacttgtgtgcctctaatcatttgctttcgggcgagtcacatcctactttttcaatttcagtatctgtgcctacagtggaaccagcaagactcaagtcagcttggcgaccatggttttatttggtccataaagaagacagcttggaccctctagttcacagataaatcgatgcttctaatgctaatttaatgctatacatgtaataatcgcgccagcaatacaccgctagatattctatattcaaactctcacctaccagtactcggcttcaacttcaagaacaagtctgggggtgtatacttcgcgtccgtccttccgtttccagattcagttcgaccgggcgttaaacatagatcaccatgaactgcaccaacgggctgttctctgaatgcctccatggccttcgaatgcctgcgccactcagacaaaacaacatcgatttcagtcttggagtcaccgacaatagcatccatcttgatgtcatttctgtcgtagccaaaggggtcttccaactgcgagcctattccttcaattccatacaatgtgaagataacaaggctaacaattgggatggcccaccatcccatctcatcgaccatagcgaacggtaaaacacagccaaacagggcgaggacttgcttttggtgaatcctaatttgagtcagtatttgaaatataaaacttaactcgacacgcattagtcatgaatcttacaggtgagccactgggatcggagtcaacttgatcgtttccatcttcccgtatgcatcagtcaaggtattcaactgagcctgcatctgactagcgccaggagcaggataccacccacgttcttcgccgcgcttgataaacccatcaatgaaaaaggtcaactggaatggaaggcctaatccctcagattcatgaccctcaagacccgcgggtaacaagttggcatattcggggttataaagggtagatggatgtatgcccaggtcctcatcgacggagttaccaaaaacccaagcagcgccccattcggcgcgtagatggtttttcacggcgtacgggatagccatgagaatgcggatagtacgctcgatatcctcgcgctctgcggcggtgggcggtccccgctttgaattgtagctatttgttgcgatcgtgcggacgagattgcgcacgcatgtattaagtgtgttcattccgttccgtccgtcccagaatcgattgtaggatgtttggttgcggaagacaagcatcagacctacgacaatagataaagatgggatctgtttttgatatgtttagttgctgtctcgtcttattggttgggggtacatacgatagtgctaggtagaccaacagtgtcgaatacgaaggtatccaagtaaacaatcaaggctgtgaacaaagcatgcagaaggaccgggactagtatggcgccatgaattgcacctttgataaagcgaaaaacaagtggccatctgctcgatattagctcatgcggataattggcatataccgattagatagctcaccttcttggctttgtccgtgatgacagctgatggggatgagtgccacgccgttcatgatgaccttgtattgtagtgttttggcggctcaaggtcggagtgggcggctcgctgaaatttaacctcatgtttagatttcgaccgatacagatcaatttgttgaggctgactcctatccttaaatcccgggggatggtggaattcggctttggtatccaaccaagccctgaaatccgggggatattgaacttgggactaggatggccgtcaacattccaaggttgaaagcgggccgaacccacttgccatttctagcgccgtcaatcacgtgacggcatatatagttccatacaacactagtatgtagttggctatgttcattgtagaaatcctaatttattcaacctctcttgtgacaaggcaaatacaattgtcgggaaagagtccatttgactgaagtggaaagaaattattatgaattaatgtagatgtagaacgatggaggactggtgaacaaaccaataccagaagctaacaggactcagacaaaaagataacatgaaacaaaacacctctccaagtatgtatcctgctatatgttacatgatcacgacaaatgggttgctaactaagtgcacaaaaccgggaagcgaaatgactgtacaggaagtggcccttctggtcgacaattagctgttgactgagagagaggacgagagattgaccaggtggcaaagatccgacctgccgtgggcagtgagggtgcctcagcaaaaggtcaactgagaaatgaaggaggaccttgattcaaagatgccaagtagactcaaccgagaacaaaaacccaaaggatagaccaatggaaattgcagaaacaacacattgcgaatgatggacgtgctgatcccttaagtagagatgtagcagcaaaggccctcaagtaacgtatactttttggtgtggtatggttccagtatacaagatagtgtgccggatgcgtggtcatcgatctagggcacccgtggactttcagctgcgggcgacatggaattgtcgtattgatcacaccatcatggtgctaggttgctggctgccatggcctgtcagcaaccagatgagattgtcccccttgttatagaccaaggtcgggaagtaaagaagggcccagaagattaaggttatgacggtcgaaacgaaggcattgacgacgagtttctcattggatgtcaacacataaaggccgaaggtcacttcgtagcggtagtacgcgagttgcacgcgatcagaagctcgttgaaaaatgttgcatcgtggtttgcgccaaggcgcgcttgatttcatgttggaggaatatttatcgaggcattcattcatggccgctgggacttgcgacattagagaggtcatggggtcggaaagggactcattttgggtcgtcatcatggccatcgtaacgttttcgccaatcgtacacaagtgatagacatcaacgttggcggtagtttggctccagaagtaggcgaaagtcgagggtgggtgtgaaagagtcgcaagagaaccacgtaggaacgctgaaaggtaaaaagtcacaattggggccggcggggtggaaatataggaagggaagggaggtcacgatccaagggggctggctacaacgggaaaaggcggaaacggagtcggcaccaggcggaaagcaaagagtagagtcattagaatatacaacatggatatattggacatagatacattgtggcaaaaactatctattctagactatcctagctagcttagctcaacttggttcctcaagagccggtacctggatcggctgtatgtggaagtatacactctcgggaacttccaaggaatactcgaggaaaagccaattagggttttccactgcgtgttttttgtgtccaaagaacggtaatcattgaatcggaagaatccggacgaacccggtgcccggtgatgaagtctagatgtgctttaaggaaagctgaagtcaagtcacttcgtacagagtaccaaaagaaaacctgtttctccagtatagaccttcaacatggcggatgtcccggatacggacggccggatgtggaaggtggtcctcgaaaagcggtatcctgtggagctggcaaacattcttcacctcacgacggagtatgtatcctcgtcaaatggatatcctgtgggttcgagaccatcagagagcacgtttttaattggttgactatttggctactggcatttaattcgacaagcagaaaactagaaaatttttatagtttcacagggctagccctgcccgagtgtaaggctacttactgatccttacgtcaagccctgtcagaattcttgctgatctatgaaagtagtaagaaagccaagaagggctaagagtggcaaaattaggaggcgccaacctataaagcctaacccaacctactagtcagttttaggtccagagtctaaactccctaatcattggtctgtcaaacctactaaatcgcaaaatatatggtatgacaactatgtatatgatttaattctaggtattcatacaaaatatagggtataaatcatgaaccaatgaaagtgcagctgtatgagggcgaatctgacgtcttcacctgatatataaccttggaaccccgagttctgacagacaaaccctttcaaatttcaaatcaaacatacagttggtatcgtaatgcaaatcctagtaatcacctgcccaagcggcaaacaatgctctcatctcatccctctcttatacaatgaatccaaattcaaactccgtctagcagcccacacccccgaatccgcctcccgtctccaaaccacctaccccgaagccgaagtacaaatctgcgacaccacctgcctggccgaatgccgcaagcttctcagcaatgcaacctcggtctaccacgtgggcccatcgcttccactcccgggaaatggaaatcgggatcaacatgatcgacgccgctgtcgccgagagtcaaaagcccgacactagcttcaagcactttgtctattccagcgtgctcggcacccagcaccgaaacctcatccaacacgaccacaagagccgcgtcgaagaaagactgctactcagtcctctgaacttcacaattctccagccgaccaatttcatggacgcgtacccggccgctgatctcgcgaagatagagagcccgtctatcaagtatgcctggaacatctttaacccgcatgtggccaatagtctagttgcgctcagggatctggctgaagccggggcccgggttttgaacgagcgggaagtacactatttcgctcagtatccgctctgctcgacgttcccggtgtctgatgtggattttgttgatgtcattggggactatattggtaagaagatagaggttccaactccgactcttgaagagggcgctagcaaggtgctcaggcttttatatgccggggaaagcggcgtgtatagtggggatcatgtagtctcggatctgagatggccggccgcaaagggagatttacgtcctgatattacaagggacgaggctgagaggctggttttgttttataatcggcgtggattgaaggggaatcccagggttttgaggtggttgattgggagggagcctacgactgttgctgagtgggtgaagattcaattggcagggtagttttatctcagctagctgaactatcataggcaaatgcttcattgagatgatcatatactgtaagatgaactttcttgtttcaattgagaaaaaaacaggtatcggaactcccgtttctagtcgggatgccgatgtgccgatgaaaattttactcaagctgtctaaatccccgaaatccccggcatttccgaccgatgagagaaagaaacaaaatcagtgctgttatagttactccgtgaagcttccacttattaatttatgaattttgccgccatagccaaagccatcgagggaaagaggggcaaggtcagatgagcatctgacatcggacaaattgattactgcatttattctgcttaacgagaggattcctatggagcctccctcaatctctgcgggctttccagcacatatttcgtcatgcttccgatgtgccacagaatttgtgggcgagctttatctaacttacagagagtacgtcatggttctcggtttgtcctgtggctctgagacatgtggggtgccaagaaccggctagaacgacttcgaagtgtattccgtatcgcaggacctagcttgacagttaacgctggagattgatttatctgcccagatatctcctgatagcctggctagctctagaccctttcgagtatggttccgcttgtatcccacgaggtgatccgctaaaggtagagatctcgacctaataatgtagcgaggcaggaaaagcgatacgatcgagtagacaagtcaatgcgaacgtgttattaccgagtcataattaaaaacaatccgaaggttaacgaaagaatgttcctggttcatcagatgtgccgggattcaaaacaacagtccagatcttgaatgggtatcagtggattttggggcaggggatgaaggtaggagaaaacagaacgctgggccgccgcgatgaatcaaattagatggaagaggtaagcactatggaacgatgcaaacggtgtatatggagtgtgcacccggagaagccaacgcagacatgcttccttgcagtggtgatatcgcagaatgctcagatgatacccacagaagggtagatgccaaaaagaaggagaaatatgtattaaaaatgcccaaagccccccttttccagttattaggtctacccgaagcgacgcattccagctcggccatcaaaggccaaaggccccgagtcatttcgtggagtcatcgggttgtcgtcagatgttggcgtgtcggatcggacttgtgattggcgacgcgctggcacactgagtggttgagtcggttgccacccggggatgttgatagtggcgctgcgggcgaggtcatcgccatcggtgctggagttagggcctggcgagactgagcttcgactatcgtggtcatcctgtagatgcaggttctcaacatcgttggtcaggttttcttcagcaggatctcctagctgatcagatggtccttccgtattcgcctcggcgcttgaatgcgcctgcgtttcatgctgctcgccagaatcattggctgccctatatgctgccagttcctcctcttgtctgtcctccaactcattcgagtcatcgacctcggcgctgagatcggtgaatgcacggcagttggggcattggaacattgggtaatcgggggagtgaagcagacggctgatacatttgtaatgccagacgtgcgcgcaggctgccatgaacaaacactgatagggccgctttattatagttagtagatgtaggattggtcagggaaaatagaaaaaaacgaaccaagacagagccaaggcaaatcgagcattcacgacatcccgaataatcagcagtctcgcccttgcccaagtttttgataaggctttctgtgtttttgctggaattcttgttagcgtcacacgacactcgggacaataggtaagatcgcacttgaactcgttgggctgctgctgccacgatcgattacattcaatccgaatgcgaacgcatcggaaaatcatttcttctcctcctcggaagtcgatacccaactgcacgatatcgccatctttgatggagtacagacgggacaccatattcggctggctcaagcgcatgtggttcaaaaatgtaccggaagaactgccaacatccttgatgtgccactgtccattcacatacaagaactcgcagtgtttccggctaacgaccttcgacttgaaccccacgggagcatctgaaggctcggtcgggttggaggacggtacaccatcacgctccgagtatcgtccgacacgaataacacagctctctgatggtagggtccgggagactgggacgaaaggtaaagagggtctcgagctctggagggaatcttgataggggaagaaccgaatgatcgctttggtctccatttttgaaggaatcacctcctcctctgccggagcgctggtaggtgcgaccgcattgctttgagcaacggcgggttctgccggttcgaccggctctgggggcgggttggactcctgcggggtgggctcctgcgagttgtttgtagaggtctctaacgtgcgaggtggcggtcgaggggcagccgaaacgctcatcaagcgtgccataggattgggttgggtatggtcggtcgagggcgtggaattagcggactcggtggatgatagttggctattgaggtcgctagcaaacccgtaactcggcgcgggcgcagaggtgtaacgagaaagaactggatggtcactttcagggcatggggaagctgtggtggagtttgtcggagagatggagtccggattggagaaccgccaaggaattcgactgctcaaactgtgtcgagccgagcgctgcccgctaggcgaggaggtcagattatgggtgtaggttcgtaaactgaagcggcgcaggcgactggggcgagggcagtcaggtaaggaggtggaggcggtgactgaagtagacatggattcgatttggcgaccatgaaagaatatcgacagagaattaaatagtgcccagagatttctgaagggtaacgtcactgggatctgcaactgggctgatgctattcaatggtttaccaggacatcatatgattagggtaaagggatgaccttggaacgagaagagatttcaaagcgatggaaagatggaagaaaggagtgaaggaaaagcgaggagattagaagagcgagaaaggcagggtgggatgtttcggccttcttgattgtatatactgtcttgtctgtcgaatctttgggatctttgctctttgccatcggttattaaagccctgacagtcagcatttcttggcaggaagatatctccccgcatagttaggatatataacgagagtatttatatgaagtatatggaataagtatatggaataatcgagagcgtataatagcaggatattgataaattactaaatccgatactaacgatattcccaagtatatacttatgcatatgtcgactgtcatggctcgtccttacttcatgtaccacgcatataggatagctaagtggtctatgctttcacataggcaatgtacatctctgtaactagttatgtactctattctgtactccctatatatcctatatgtgatctataccaaagcagatatcattatgtcgaatcaactagaacaatagctgaacaccacaggttacaaccttagatcttagaagatgtggcaaataatatatattaccaatgaacctgtagggcctgggccagttatctgtttgtctgacaataccctaactattcctatctacaaagtggcattccatgtgatacctgcaagtcaatctctaaccaccaccaacatgcccttatccatatgtgactctatctggtgatcatctgcgtcacttacaaaatcacaagagcaaaggtaatgccttcattggtgtatagtgtagcacggaccttgacgggacgctagaaagtacgctttagacggcaaaagacgttgaacccgactagataatagcgatgtagtgatataagaagtatttcaacatctatagagtaagagcagtgtctagaaatatgctgtacaacttactattattaaccagtagttgactttatatgatgcagttgatctccctttccggattggtcagcctagagcttcccccggggccgatgatgtatgtgctggagctggtgcgtgtgggaatgaaaatgaaaataaaacccatggaagagatgaaagaggagaacaaaaagaaaacaagtagattgacctagtcaattcgatcaatccaacccccaatgtatcctccaacacatagaaaagccattgaattccaagtttctgccgtaggagactagttcgctccctctcccctcccttaatgaaacacttgcaacttccttccttccagcatcaggaggcttccctccttccttttttctcatcacgcggctttttctttgtgtttccctccaaagcttcggctttattcaactcccttattttcaccttcgccgactcgtctttcgcatccctcacactcactagaccgcgcccgatgcgggcttgctagccagcatgagtggaatcgcgaatgcctgtctgtcttgcttttcagcagtggaccaatggtgtcatatcacagcatgtctcggtcccatcggagctcgttctcgagatggtatctacgaaacaaccctggccgataatgagcgagaagcggtatcagatcttctaggctacttggagaacgtacgtgctcgaccgattcatcattctgaaccactatcttcccttctctgaagcatagctggagactgggttcgcctgggtaccgccctgcaccgagcataccgctgacttccaattgtacagcgcgcagagaccgacttcttccacggcgagccactacgagccttgagtacccttgtttattccgaaaacgtcgacctgcaaagaagcgccagcttgacgtttgctgagatcacagagcgaggtgcgtatcgccatcttgctagcaatgatgcaagagctgaccttccgtcttatctacagatgtgcgcgaggtcgatcgcgataccctcgaacctatcctctttctacttcaaagctcagatatcgaagttcaacgggctgctagtgcagcgctgggcaatctcgccgtaaattgttggtcacgtccccgtcccgtcacccatcacccatctcctttcccgcttcccacacggtcgctaactcggtgcagctgagaacaaggtcttgatcgtcaccctcgggggcctatctcccttgattcgccagatgatgtcgcccaatgtcgaggtacagtgcaatgcggtcggatgtataaccaatctcgcgacccatgaggagaacaaggccaagattgctcgctctggcgctctaggtcctctcattcgcctggccaagtcgaaggatatgcgtgtccagcgaaacgcgacgggcgcactgcttaacatgactcattcgggtaagtggctctagttgattcgtctggccgtttctctaacatgaagaccagatgacaaccgacagcaacttgtcaatgccggcgctattcccgtgctcgtgcacctcctctcatcccccgacgttgacgtacagtactactgcacaacagctctcagcaatatcgccgttgactcgacgaatcgcaaacgactcgcccaaaccgagtcacgcctcgtgcaatcattagttcaccttatggattcatccactccgaaagtccaatgtcaagcggcgctcgccctgcgcaatctcgcctctgatgagaaataccagcttgaaatagttcgggcgaagggcctttctccactgctacgactcctacaatcctcctaccttcctctcatcttatccgccgtcgcttgtatccgcaacatttctattcatcctcttaacgaatcccccattatcgaagcgggcttcttgaagccgttggtggatctcctaggctcgactgacaacgaagagattcaatgtcacgctatatccacgcttcgtaaccttgctgctagctctgatcgcaacaaagaacttgtcctgcaggccggagcagtacaaaagtgcaaggacttggtcttgcgtgttcccctaacagtccaatctgagatgactgctgcaatcgctgtgctggccctcagcgaggagctgaagccgcatcttctcaacctcggagtgtttgacgtcttgattcctctgacaaactctgaaagtattgaggtgcaaggcaacagcgcggctgcgttgggcaatctgtcttcgaaaggtatttccccttatatttgtgtgtccttataagctgctaacaaattcgtagtcggcgattattcgatgttcgttcgcgactgggcagacgccaatggtggcatccatggctacctccatcgcttccttgccagtggagatcccacattccagcacattgccatctggaccctcctccaactgctcgagtccgaagacaagaagctcattggatacatttcacgatccgaagacatcgtgaacctggtcaaggttatctccgacaagaacatcgattcggatgaagaagatatagatgatggtgagggtgaagtcattacgctcgcccgtcgctgccttgagctggttggagctggtcctaagcagacccttgtagaagcctgaaccttctgtttcgtctggttataccacccttgttctcacccttgttctattttttttcggtcccttctgctgacgatgcttcctcgcaaacaaggtcttgtgtcctttgactgaatcgggattttcttttcttctctcattctgtcgctgaaagcgattattttcagaacttatatagcgagtaatcgatttttatgataacttaaggggacatagaaataaaggcgtttcgtcaacttgacaaccttagatggataagaagtatgataagctaggtatttgcactttcccctgctcttgtcgcaccaatctcaaccgtgagcaagctgggacgacatcgagacttgcacaagctggtacgttcttcagatctcacgcggtgacctcgctgtactaaccatccgtctttttacagaaatattctgcatcatgggcaagcaggtaaaatggattgtcgactactcgccagtgatccttgcatccaatgcctaagttggatcagacccagctaacacttcaccaactgtctccgtgaggggatgtttgtttcatattgcaactatggcgttaccccagggatcggtatacaacacactaccactcacaatgggtcgaggactattgacacaagtgggctgttcaggtgatctcgtcggtttcatcaacagtcgtagaatcgtcagttgtgagattggagtcttcaatggtttcaatttggaagacattctttgcgacagcaatcttgggaggtgcagaatcttcggccatcacatcatcatcctcgtcatcctcgtcgtcgtcgtcatcttgttgaagagcgttgaacgccatggttttgcggttggtgtcgtcccaatcagcctaattaaacgtgagcacctgtacatcacgaaacaaccatctgttttcatactcttcgggagttgacggtcttgccacgagccatgcttttggccttcttgatttccaattgatccatcacggcctcggctcggtccattcccttttgttgccttaatcgctgggcccgtgaaaccttgtcattttttttctgctttttctggatcccggaagtcgcacggtcagccagaaccgaaggccttgttgtgttaggagattccgctcgtggaagcgaagtcaacgacttgtcaaggtcgagacttggggatgctgctctccgtgctgcgcgggaacgctgggactggcctgtttcgaatattagatacccaaacgtcaatgtatgcggcattcgtattcaacttacttttgctcttcgccatggttgctgttttgaaaaattatcaatctcgtgggatgagatcgctatcgataaaaaaaagtttacggcagacgaagacgaccaaaggcgcaccttttctacgcaaacatgtaatttgatgtccctttctacacgcgtcttgacactcccacgttctctgtcaatccatgctactgctcatgctggcagataccttttgtcacagatatacgtctggctttattgacaatgaacacccgcgacgtgcgctctgagatcttttccaaccgccccgatcagtacgcaagtcgcaacagtcattatgaaaccgccctgacgactttacaaaacaataaagcattagcatacatatttattgctcttatttcaatctgtgtctttctcggttacctcggacttgttcctatatcgctattccagctcccctgggatctcattgtctattttacaccctctcgaatcgttgtcgctttagaccctcaaatatcgacctccaaccccaacccgctagcctcgcctttgtccttccagaataaaagtgacgcgatgagacgtattcttggcttagacaacaacgtctacttccctttcttctcccggtcaaaatcgctctctattttcggaaatgcgctgctaggaaacactcaggatgccacacctccggggctcggaaattggaacaactcgtgtttccagaacagcatcatacagggattggcttctttgaaatatctcgccgagtttctgggacacaacgtggacaacctctcggacaaggcttccgtctcgacgcacagggcactattagacctcatcgaccgtctgaatagcgcctccaaaagtggaaccaagctgtggatctccgggcctctcaagtccatgagtagctggcaacagcaagatgcgcaagagtatttttccaagttgcttaatcaaattgaccttgaagctgagcggtgttcacgcggagagactttgaatatgggattgaagatcgcgggaccggatgagaacatatttcgagacagcgactctaatgacccggtggtgtctgaggggtccgaatcgctctcatcgacagataagatttatcttgatagggtttcatcttgcaatcctctcgaaggcctactcgctcaacgagttggctgcatggattgcggatggactgaggggctctcgttgatacctttcaattgcctcactgttcctctgggcaagagattctcgtacgatgttcgcgaatgtttggatcaatacatggcgcttgagcctattgaaggcgtggaatgcgccaagtgcacgttgttgcgtcgactggagcagcttatcaacttgatcagtgggattgaagccgatgagagtcggtcagacagctccgacgaacctccacgatttaatgctgtgaaggagtcggcctactcgcggttagaggctgtcaaggaagctttgcacaacaatgatttcagcgaaaacacattagcgaacaagtgccatattaactcaaagaaccgagtctcaaccactaaatctcgacaagccgtcattgcacgggctccccgctgtcttgctatccatatcaaccgcagtgttttcgacgagtacactggcacgttggagaagaatctcgcggcagtcacgtttcctcagatgattgacttgaacaattggtgtcttggcacccaacctcccaacaagcacggcaacaattatgagcgttgggatacaaacccctctcggtccatgcttccccaacctggtgaatcaattcaagtccctagcagacaatatcaactacgcgcaattatcacccattacggccgacatgagaatggacactatatctgctatcgcaagtatccgacatcagaatttacagccccggcaccggacgaaattcttcaagctgagggtgacaaggacaagcccgagcgttggtggcgcctcagcgacgatgacgttcagatggttagtgaaggtcatgtgatgagccaagggggtgcattcatgctgttctacgaagctatggatgattcctcgccgcgttcgactcgagctgcaacaccagaacatgacctagacagttatacagagtctacccagttcggaagtgaagaatcaatgccaaagaacagctccacaccatctactgtcaccgactgcgaatctgcctcatcccgtgagaccagtatctcgttgccgatggacgacttgattcctgccgacgtgcctgtgaagatctcgaacgtgattgacactaatgctcaggcgaacgatgaactggactctccctctaccattactgcatgatcaccttttcttcatacgttttccctactttttgcccgcatagccgtaccggctactgcatcatgatacccgataccacgttccatttgaggcgctgatttgaactccattgtgtttgggagtatgtgtaaatttatgtactattatgaggaatctgaacagaatgacttattgaagcaacacacttgaattcgattcagcctgactgtaattccgtagactcatccacgactcatccacgactcattcattgtggattgcctccgtctcttaaaaacccagtcaacactcggtgatgcagccttggggttcatatccccgcatttagcacgagcaccttgtgaaaggcgacccggtatgatggcccggcatcacctcattaagtaccttggggccaccacagcataaaactacatgaagactcctttcctcgccaaattagatttgcaacttacttttctacattctcgacgagttctaccagcaaagtactaattctgacgtaaaccgaatctgcctcttcccatatcgacgctggaaatcgttgaagctgtactcgagtctgtatagatcccgtcggagatctccccgggtcctcatttcctatctgatcgtcataggtatgatatcgtctccaatatttgataaagctggtcgttcctattctaattgaacagaagtattctataacatcttcaataatgtctatcaccaaatcctcacagccgcatgacatattcctcgtcaacgagctactcgagaacattcttctacatacagatatgagaactctattaacatctgctcaacgcgtatctcgcgtctggaaccttatgatcaaaacatcagtccgactccaagagtccctcttcttcaaaccctctagagagatcccagatccctcacagcgcctccgcaatccgctcctagaagatatcctctgggcccaattcttcctcaagcaacaacaaacctcagagtcgaaaatcaccgaagtaagcaggtttccgctgcgggaacccgagcgtcgcaagctcaatatctacctgcgcaaagacgccagttggaaacgaatgctgcttcaacaaccaccgacatcatcaatcggagtccttgaaatcatcaaaagatcagactcggaattcaccaaattatcgaccagcccaaacgcattcctacggatgggcgatctcttgagcctcctccaaggaggtagcacgctaattccaacccgcaacaaatggataatgtggagcgggcgatcccgtatcaggatgcccttgaactttgaatgctggacacctaaatgggtatatgagccaagtaccctgcggccggtccatgaatggatcccggaaaatatagactgggatagtctccggctggaggtggcatcgatgtatttgaatgatttcgactgtggtgtggtgattgtatccgaacggagacaggtgctcttccagggtgaggatcgaattcacagggagagcaaacttgatcggcgactggagaaagtgtttggggggtgtcaggtggaggttggaaggatgcatatcaatcactcttggattcctatcaagggtgttggtgctgatcggagatgggttcttaggccatgttcggctactcctcttgttccgatgctgagtgactcggaggtttcagattcgtcttctatgtcttcggtttctttgtctgtataggggatatactcgaggctctgcacgggcgtatatcttgaccagtttgaagagatttggaatgatactctgctatagcatgctggttattgcataggaaagaaatgatacaaccgagagtcgccgaccgactgtggcctgccggggttgtttgttacaaacagcatcgctcttcaattgtatgcatcataatcacaatgaccacttcgggaatcatgatcagcctaggtgttaggataccttgtagtataggaaagacatagctgagcttagcttaagcgtcttatgccccacttccattcaagaatagtggagtgtttcatgattgctagctttgtcggcacgaaagagggcgttggagaggcagcgagatattccgaagcgaactatctggactccttcgagaccaagccacacatttcatttccggcaaatcccaacagaaggtcccgaccctcatctacaggtgcatattccaaagagccaaataggaaggaaacacaattcaccgccagtccgtctatccgacccgtgcatcggggataaccagccaggcaacgaatccatgccactttagcgcgaccagggttgtcacaatactataacgaccctgttcggatattggccagcctgtacgaccaggatgtttcttttgctgttgaaatccaccgtggcctctaagcgcagagcgtggatgtcagtacccagcgcagattgaaacgtcgatgcgcccgaagcattcatgcccggcattgcacaggaacaacggctcgacaggacaaagcgattgccagctaggccgaagtaggcaagtcgaagaattgcagcgaagacgcatcattacaatgctaatgcaggttcacggcctaccgcagtttctcggctttgcacatgtgccattgcgatgtgtcgaaacgttctcgaaaatggcaaccggaggtatatactgtataatgacggtatccgttggcggagacaacccctggatttcgtttctggtcgatgttctgttccgttttgggaatctcaaagcgtatattctactctgtattgtatacgggaaagcgaccgtggcgatcgcatcttacccggtcgcaaatatcggtcaagacagataacctctccaggctgtgagtcgatacagaataagctctgactcggagaagataaattgattggcgtcggaagagaggatggctggcttttgtatccaatcgcgatggctgctcgagcggtctcagagatagaccgtctgatcccacagccattgcaatattggcgttggtctagattggggcgactgtgctatccgtgcggatcttcatgcacgcacagggcgaggactagggaggcgttgattgatatgaaagttgatgcttaagcccccccgggacagtgccctaggacagtggacacgtcttacaccgtcaacccgccactgccatcaccacccttgtcgatcgatgcagtcgggaccgcggatggtgtcccggaaggatctgagttacttcaccgtgtagatactccgcagtgcttcctctccttcgacgatgtgctatctcacattcttccgaatccccgccagcggaatgtgggtcggatccccatggggtggatttgttttccatggttccgtgtctttagtgcccgcgtcaatggatgagttgcgtcggaattcgtgcagatctggaaatagcatcggctattaagtcggtgagggtgtcggaacggtttcattatcttagtgtctataaaagctcggctcttttccgagttgatacggagtagtgaatcagatactgaatcaggagaaatatgtacctagacaagtggattcatcctctttcttcagctattccatgcaagaaacccgaccatctgtccttgcgattttagttcaagatcttgcatgtgaactgcatgactgcatatgaggtgcagggtataagctgcagggaaacccgggaagggctggaagggactagcgtggatctgagctccgatacacttctacacggctagagctggccaaattgaatgcaaatcaagctcctttctgcatctatttcatacttgagtccagcccacaactgtgcatataaatctacctgtacggagtagagcgtgttgatccaagctcggtttcaaagcggcgtaaagactaaccgaggtaaatcaacagaccgagctgtcgtctcctcgctgaaacaggaaatttctgcccaacataccgagtattctccggaattaacgtagcttgggtttgactcaaaaggaacaccggagctctagcgtcccagtgttccggcgcggaactatctgtccccaccatgaaacccaggaggcaggtaccatgacatgcattgggtacctatcgaagccctgagtgcctgaaaagggggagatctgaacacgacgcgcaagacagatcgtggactgcgacccctgacccagcaagctctcacatacttggaactatgtctgctcgaatatgagttcacgagtggagaacggagctccgtagccggggcttcgaaagcgttgaaccgcgaggctgtagcctgtcatgtcgatctgaatttgatttcagctcggtagtcgcatccccgcttgacccctttccaagttttctctggttccccggcgggccgagacgcggaagtctcaattatggagtaagcagttggaaccttgggagagagtaggaggcgtgggggggactctagtagcgctgcagggaattagatatgtatatttgccaaagtactcttgcgatcagtatgtcgggagtatacatctgaaatgccttggagatgataagtatgagacagccgatcatgcgcccgaacgggagggtgcaaattggtcgtcgggacacccaggatcacggattgatccacttgggccggggaagagtgtaacattcttccccgtagacgcgagacttgcagcaagcaagtcattcggtgcatccgacagatcgtataggcatcaatggctgggcggcaatgggcatggcatttcggagatctcgaaaatcaggcgttgataaatgggaaatgcctttgttttaagtggcctagatatggacgatctagactcgagacctaatttcttgattttcgaaaaaagggcatccactagagcctcggtgtgactgtggggtgcgctctgatttgtgcgatattaaacggccttttctcggggctaattcgatccatggacaggacaccgacaaggttactccgtacgagaatactccatccggagtagaacggtagcatcaggcacactagcgaggaactgcctttatccgctagaggggagtcccgacgcgccggaagcccgttgatttccaatccaatccagtcccttttcatttagattccaggctaaggcttctagagggcgacatgaggcttctagactgaaaaaccgaatcctcgggcttgagacctggcccgaatgtggagacacgggggaactcccttcgacgctttaaaagatagttcgttgtccccaggtagaatattcttcaacagtatcatcggtgttgacgtgttgacgtgttggtgaccgccaatcgctaacaaaccggattcctcacgcgagtagggctgcaaattctaattcggcctgcagcttccgcgactcttttttaccctccccatgaagcggtgaatccgaggcttgatcattggagaattgccatcggaactggaaaaacaatccgattttatcagaccagatctgaaaggttgttgggcagcccttttgggaaatcctcgatctgccgcaagggggaatcgaagccagtgatatcagatatctgattgtcgaccttgtatatgtaccatacatattatcccaatctctgtgtcagactcagtcccagacaaagcgctaaaccggggatccgatctttccccgtgtgtcagaaatccgatacatctggaatcaaagaaaaaaaacaaaaacaaaaatcccgatttggatttatcttgatttatatttatttgggttgaccagttccacccgtggacccacccggcgttccttccaggtcgatcgacagccctttgtttgcggaaacctccttccgcctgattgttcggatttcttttttatttgtttattcctttttttcttcttttttctttttgactttcctatttgggatttttcttttattactttcccttttttgggaattcgattttcttgactgcaagggtgtcgggaagtctagaagtctttccccggctttgatctttttgatatctatttgtgtgccccttctcaccgatcattgataaacaactcgcctcgactcttcttccttccctcacttcgccttccaccctacacccttcacactgttgtctctctcacctactgggccctggtactgccatcccttttcaacatctactcatatccgccatcatgattcctattcagactcgtctccgtgagatgtcgctgcccaaggcggtggctcctatcgccaacaccgatccagcacatcccacctttgcctggagtggcagcgcctcttcttccatgtccagtcctttcgcccctccaccaactcccatcgactcgcttctcgatatcaacccacgcaagtcgtctttctctagtgagctgggagccgcatatgcattcccctcctggcccaaccgtccctctctgtccagcaacgactccaccgattcctgtgccagcgcctttctgtctgacgacgacctcctgtggatgccagagaactcggccgctgagcgagtcgtggacgaggccctcaaccaagacgccactaccgtctgctccgtgaccatggaacagcaactcttgcgcatgcgagccatcgccgagcaagaagaccgcgccaacttcctcgccaaggtggaagcccacgcacgagccacccaggctctccgttccgcaaagcaaagcattgtgacagagcgcgaggcatcgaagcccaagaagcgccgcgtcgcgcccgctcccaaacgccgtgctcagtcggcatccaaggtgctcggttaataagctcaccggcagaggccggtgcagcgcaggcgctctccgaaaaccgccacattatcttcacattcatgtcattgccttgccttatctttaatttcacccccgcatctctccgacggtgcagccccacacacgacggtgcctaatttcgatttattttcccagccgtggtacccgcgagatcgcctcattcgacactgcgaatcacactcgcagccacaatctccaagcacaacatgccatggtcgatcagccacatggaagcttcaccccccgggtggtattttccctgaatgcgaccatgcacgggccgacctcgggatccatgccagggcccccgcgcttacctaatatctcgctgtcggcgcttctagaaatgcctgggccaccgtcacctcctccgtcacgtccgaccctcttgtccttcacaccgctggttcctttggctctctgactcatttccacttccactttcacttttgtttttcttgtttttcctgtttttccctgttctcttttcagcgaatccgttattccccccatcccacgaggatcatgttcttgcatggagttccagcgattcaagtccttttcggcctaccaggcttgcatccatggcggtgtttctatttccttctgatttttctcggctcttcatgaatctgtctttccagcgctttgtttcagataccccgtcttgtataccccactattttcttttttttttctctcgttatcttccacgcttgatatttgaaatttcaacagcgctagttctctgatccgctatcggaatattgcgccacgtgccatatcaaatttgtcaatagccgtttagtacagagtacactaggaagcctgaactaagcacattgaccaaatcctgaaacaagcccaacaacctaaaataaaccagacccattatccaacaacactatgttgtatactcccaacgccctcgtacttttaccctagtccccgtccctgccacgttgatgtagatggagcctactgcccgaaatgcgcacaccctcgaaatagaataatccaacagcggaacgccagccttgcccgcctcgtgtcccccgcttgagtaactgcctgaccttggccaacgtagaccccgggaccctaaacggtgaggctgtaacagcttattgttgtctatgtatgacacgagggctgtcgttggaatgcaacagtgagatcgggccgcctttagtaatccacaatggggcgacatggttgacctcatcatgggactttgtgtactccgtaaatgtacatacattagtggttgataataaatagcccaccggagaatatcgtgaagttacggttggggttggggttgttgctaggctgtttttggccggagttagggtcttgcctggattgccctcgccatttttttctgttggcggggttcactagtcggctgtggttgaataaggaatgttaacccgaagttggtgttgactcttgagtagggatgctaaaatagccctggtacctatagtacatgctggattttagcgcttcactccctgtctatcacaagcatacggagtacattctatagtatagttggcgtttcaaagaaagcctcgatccccgcacgtagcgctgagctattaccgtcactcttctttgttgccaccgttggttcctctcttctgcatttacgctatttgtcgtggatgtgttgcaccaacccacaagagcaaaatatcaagtctgggcatcacatttcatgaatttagtcgggcacatgcttcaactactgtgttggttgttaccaactcgaaagaatcccggtagattgtgactgatatcacattccaatgagcggatcatacgtatgcctatcggagaagcttccgtcgagggcaatatcatctgataatgattcaacgttggattgtggtcataatccactagcattcgaaaatcaaagcgtgcgatacatgcaggtcaaggcactgtggatacccatatttgacgaagtagagagcattcttcaacgagtagtggccgcgtggtgcagtgcaggactttaacaatatatctactcaagatgatgtcagagacgttatatgtgaggtaacacttgatatcttgtccgaagttccttttacttgtctcttttttatatttttcttagaaatgagcagtatgtgactgtgccgtaaagccgaagaacatacagagcctagaggcgaatatgtatagcccagaccggatatgcagaaatccgacgagcatcattagtgtaacagcatcatcgatatcatactaagggtagctatgcaatttgtaagagcaaactgcatcgggggtgttactggaaaccatgaacggctgaattggcatataggatccatcccggtactcacagattgtcaccggtagtatcagggtgtgccagatagtcgagcctgatctatgaattagcgaggcgggagttaaagagagatttagttactttaacacaaatatacatcctagtcacaactccaaagggataacttgacactaatatttatccgcatggcagaagcaagggtgaaaccgaacttctatatggccagagctggtagtattgagcgggccaaatgtatccatgaagtcttgtaatggagaaacgatacttgctaccagagccttagtgacagctattacaatatcgactcgcattcaaaacgaccaaagtcgcggtgaatcgtcctatgtaagagcacgccattgtcgaggttgtcgattgtggtcacttggagagtggccagggttaaaggaaaacatttatatatcattgccatatgaaagaattcctagcctggaagccttgagctatcagcaccttaagctattagcctatagtctttccaagcagatagacaaatggtactataccgtagactgattgaacttgccaaaactgaatggtaggatgtgtgtgggaagtgagatatcatgggtcaggagaggaaacatgcttctatatttctttctaaggtctaaaagtgctctacaggccgtctatgatactctatttcctaaatgtagtcacaaatgaccaaaatgactatcagcccacttgattgataacctcaccaacacaccacttctcaatcgtgttcttcactgcagcctgtaggttttgcaatgttctttcagaataccaggcaaggtgaggtgtcaacaccagattcaagcccgctgcttctggacctaacaacggggaatcacctctcccagcaggttcagtggcgaaaacatctgtagccgcacctgaaatagctccgcacttgagagcttcaagcagagcttgctcgtcgacaattccacctcttgcgacgtttaccaacacggcatggggagacataatctggaactccgcagtagagattatgttgagcgtctcagcgcttcgtggcaagcacagaacaaccacagtcgactttttcaagccatcttggaacgggacccgacccggtcgaggagatacacctttacgctcagcaataatcacgttcatcccgagacccttcgccatggcctcgattcgtttgcccagcgatccgtatccaatgatacacagagtctcatcactacacagcaacggggcctttccatcaggtgcacgaacccgactgagcaaggtgccatgggtcttccactcagtatcacacgacaagcccgcaggaactgcaactgtggcgttatggagctccataaacttccgtcgagtggcaaagtaaagcccaatagcgtgttcactcacactgtcaatattacagccgggacagttgcacacaatgattcctcgtgcggacgcagctgctatatcgacgcagtctgtgccggtcgccatgatcactataaggcggaggttgggggtaaattcggggctgaggatctctgccgtcaggcgcgtggttgtcgttataatgattgtagcatctttgacgcgactgggcagatcaacgagatcggtccgtcggtggactgcgcgggaatgccgccctggtagatcgaattcgggaattgggcaatgaacagcctcaatggcgacgatgtggtgtatgatgttatttgcggtcatcattatgagaaaaaagagaagatgtggtactggctttgaagatttctaatgacttccccgccgtaaatatctccagcgcgataagagtcatatatacacttccttgcacgtgacgtgaccatttatcttggaaggcacgacagttcgccaccgcaacctgcaatcaacatacaaccactatatacaatggccgcctcacgctcagaggttagtccccttgggtttgccgaagaagactttgccgcgaagaactatgatcagttcgagcaatgcaacttacaaaatgacaatctcttccctatcgacaaattcgatatacttcgatcacgcacacccgcagcacctagggcatacaagctcatcgagccggcacttctgcttatctctcgaataattcttgatcgtccctccactctcggctttgctcgacggcgagatacaggtgcccaagacgtgttcgttgatagggaggcagagctttgcctcccagacgaagagattattgacctagttaaaaagcatatcccagatcttgaactggatcccgacatgagtgcaaacttctcatcatatggagaaacaatccttcgccctgaatcaccctcggatatggtaaggttggactacagccttttcaactattaaaatcataagctgcgatccaatctcagaaaatggcagggcttctattactcgctacatcgctaggccatcagatggcccatattttggaattccgctgtatccgtgcctgcaaactccgcactgaagatgaaccttttgaaataccacctggcattatatgccgtgaggccggcacggtctgggagctgagatcctttggtggccgaatttatccagtctgccagcctgatggtagtctgtacaacattcaaggcttatgtcttgagattgcatcttgtaattttgacgtgatgaagatgaacgacgatctcctggaggaccaggttagcgcctcaatcagaagacagacccggatgctagatgatgtgcaggttgaaacagacagcctgagcaagaagagaagggtccgtagatttcctgttcttacgaacatttgcgggggcaaaaagtcgagcccaagcttgtgatgggattgtatggtatcccctaacttgtattcttataccatcgatcaaattgttatgcacatgaagagagtggagggaccaagcctggtcattagtctagtgaatgccactttgaatcgctctattatttttcaatcatcccatccttaaagaatatatacatatcatccactgtcactatgcgttcgctctacctcgtcgcaactctgcttctaatccaacatcatagccccttgccaagcagttcttctcctatctctttaagcagcggctccttcttcacggcctcaaccttcatctttccaataaccgtatctgccacacccatagcgcgacaaatatcaattagaggaccatccatcggggcttcgtaaacaagaagcccaagagcaaacaacaacccatgcaatgattccacgctctcgttctcgcgcgaaacggcttcaagcaatgacgcggccagttcgacctgatcttcctcggacagaggatcgggctttccatccaagcgggcgttgtgattgaatgaggcaaggttgtacgcaaaagaggcggcaacaacgcggaggctcgtttgtgaatctaggagggagttggtcgcgagacggagacaggtctcgcggagtggggatgaagaagaggtgagttgttctgggtatagaggggtgctgaagagattgcaggctagttggagagccacgatgcggagattgtatggacatgaggatagatcctcttgggatagcggtgcaaggagggtgaggagggttgcgtgttgggcttcttcggcgaagtagccacttgcacgtgggtcaagcagaagaaggcgaactagatcaaccacggcaaaatgactgccactgggaagcgtcgagtacatggaggtcaatattgtggcaaatgtatgcaaatcagggaccctgatatcggcgacaggttcggtggttgagtgacgctgcttcacaaattcaataacctccacgacaccgtggccttccttgaacgcgtcaggaagtttttgaaggagcttttcgagtggtggaactttcttatacatgacgaaggttgtaatctctcgctgaagactgggaagtcgcagttggcgatggggatgggccgggtatgccatctctaacaacatacgaacgtttcccactagcttagccggggttgcgccgctccattgatcctgtttttggcccttcaaaaatgtcataaaggtaggagtcgatctcacgctgtacctcgtggcaacatcgcgagctgcgccgacgtcgactttgatgagagtacctcgctcacccacttccgctgcgagctggtcatatgttgggtaaacagccttacagggcggacaagttgacgatgtgaagaaaataacggcgcaggaatgggaagcactggacagctcactttgcagctgactcagattgctcacaatgcggactgtgcgcgctcctagatgtgccaccggctgaggtgtaggagggacagccctcgcagtagttgcttgagcacttggcccaggggcaggacctgtcccggtgccttgagtgacgcctttaagagccgcctcgatttgaggtttcatcatttgcccaaatggagtttccaggaaagtgcgaggtagattgataatgtggtccgggatacttttaccgacaaggaacattgcaaggtcttgagtgaagttattgcagttatgaagaaaaaggtcgtatgactagaactgattagctatagttccgttgctgaattgttaatgaacgaacctcgggtgtataaatggtcgccaacgagcccaggtattcttcgataacctcatttggaagctcagtagtacctagcttcacgacctccatgggctgtccatgatgtgtactccctggagtagcggtctgaataccctgaccgaagtaatactcgattccgttaaggacaatagatgtatgataaatggcatccatttgtatccctgtcaaggcaagggagtactgtacaaattagaggttgctcgctttcaataacgccttgaacataccattcgggccataccctatgttcaagattagttggtatttaccacttgtagaactggaaaacctacctttgaaaggtcgtagacatatagtgagacatccatgatgaggtgcgtgtagaatagaacctttgaagtgaaagtcgagaaaaggagcccttgaagtgcgacctggacaggctccaatccgataacgtcagcaccggcacccctggaggctgctatcaccttcgatcgtgttctataacattttctacggatgtgatgtttgatgtttgatattcttactttggcaaaatggaatgtggtgttgtaaattgacgcgctctcatttctcactaggtatatactgcctccaggggtctcgataatacgttgcgcaacttcagaatccaataaaggtatggatacactagatcaggagaggaataatgaatttgaagctttcatatgctttaaatgttttcaatattccaataatcatttatacgcataattgtgtataataaagctgttgaagctggcggcatcgcatacatcatttcccaatcgccgctctccccaccttcgtcacctccagggccagatactcattctgtccatgccaacacccttgtaaagccacaagcacaagttctgttagtgatatctacatggtaagacatccgggatatcctcaatacccaaccaaacctgactccctcgcagcctcctaaaaagcgcggagacgcagccagctcctccgcaccggcagcgccaaagcgcggacgcgcatccaagctcgccaaggagaacaacatcaccggcgaagaggaaaacgaaatcaaagaagtctttcacctattctccgacaagaacgcagacttcccagacgagaaggagggagtcattccccgcgaagatgtgcgcaaggcactggtgtaagctctgctagctctctccctccaatctacctacaatccgaccctctcttcctcaagcccctactcttcgactacagttaccaaatactaacaactttcccttcaacagcgccctcggcctccctcctacagactcaaccgaactcgcagaaatcctctccgccctcgatccaaccctaaccggatacgtgccctacagcccctttgtctcaatagcagcagccaagctgcgctcgcgcgatgatgacgccatggctgccgaggtcgacgatgcgtaccagctattcacgcgcggcacgaatggccccattacactgtcgcatctgcggcgcattgcgcgcgagttgaaggaggacagtgtgggcgatgacatactcaaggatatgattcttgaagggaatgggggtgctgggttgagtgccggtgttactttagagcagtttcatgatgtcatgactagagctggtgtgttttagaagtgggggaatttgtgtagactttttgatagatataagggttgggttcggcgtttggcatagcatattcttttagcagggagtctgaggggttgatactttgaagggatcccaaggttgttcgaaaatcgattatcatttgtaatgtcccattgtgagtgtaagtacatactttcctccaccagcttctgcgaaagacaggaaagaattaagcctgctggtactagcaaaaaaaaaaaaagagtagagaaacacagccagtggaaaaaaataatcagagcaggagcacagaaggagatatgacccgcgcatcaaccataaagaactcccaagaattgcgaaacttgtatcgtgccagagccgcgatggaggaatgaaagcaaaagtcgaaccgtttaggagatttcgtcagccatgccgatgtcctggctggcgctggcctgggggacagtgccgttgacaggagcagtgccttcggcagggggcgcatcgttggtgaagtaatcaatcatctcagcatcaagctcctcgacagtcttgggctttccgcggccggcgttgcggccacgagggcgagcagggccctttccacgacggtttgtcttctcagtaggggtcttggtttccttggccttgggggcagcggcggacttgggccgagccttctgactgtgaatgaataagcatatggatgcggacagctagaatgaacatcaacttacgcaatgcgctcagtaagaggcttggaggcagggataacaggaacgtgagaagcatcatagacaacttcgatctgttatataggtcagtcaatgttgcagtgaaggctagccagagaaaaaggatttaccttcatggggcggccatcgacgaggagtccgttgagctccttggtagccttggcagcagtgtcagccctgttaaattggatggaggcgatgccacggctagtgccattctggttgtaggtgagcatgacgcgcctaacggggccagcagacttgttgaagtattcctatagcgcaaacgaagacgattagtattttcgtcagacaatttcagtgagcgcggttctcgagtggtggcggcgcaaacgaggacggccaaaggtgagagagcatcagcgagcacacagcatcaatccatcgtctgtttcatcctggcattggaccacggagcatatagctccttaattgcaaccccatgcgataggtcgcaaatttgcttcccgcaatggaacataacacaccaacaaatatccatagtatcaagtctccacttcatccatacatccatcaagcggtccttcaacaaaagcattctttcacgtcgccgacatcatggcatagttttccaactaaaatccatttgtccatgaatgtgtcatcccaacaacgtagtgccatgtcagacacagtttaaacttctccgagtcactggaataggtaatcaccccatagcagcaaaactctttacggagagatttgagacaagagtctcgaataggtaggtttcagtctgccctctgaacctgttgaccactattccactgatgcgctcgctgatgcccgtaggatttcaaagtagaagagatgaaggaaatgagcggaattgaagagaggtcaggatgatgaattttcatcaatcatcctcggcatagtactcagataacaaggcaggtggatttccgcatgggaattgacacgagcaatgtacatcttttcaccgtactacaacacagtttgacttcttgtctcgcagagcgccagcaatgtgtatatatttgcagagacatggagaaggagcaaactgtgtgtgccgtccatcgaggaatatccatcgatgtgggaggtagagagaagtcgagagaccggtcgaaatcgtttgcgccgcgagtctcgagaaaagagatggcgatgaaagccaatatgagagcctttagatcaacataccttgacattggcctcggacacatcggaaggctgaggaggttagcgacaagctgaaacatcaatgagtaagaacttaccaatccgctgacaagaatcttgctggatccagtctgggcgacaggggccgggtgagcaggcttaggagtcgccttggtagacttcttcacacctccaacggtgggtgccttggtcgctgcgcggcgggaaccaccacggcgacgagcagtgtggcgagcggtctggcgacggctgccgacgagatcgtcaagagatttatcaaggttggcagacatggctgtgatgggatagcaaagctggcgatttgcaagttcagcaaaagttactgaatgaacgtgtcgtgaatgatatggcgacctaggattttaagtcgctttagaaagaagttgagggcacggtggggtcacgtgggttctcggaataggatgaagcaggtatgtttatggagttgaaaatgatgaatcgtgaagggaggaagggacgagagggtgaggagagggggcaggttgtagcctgattttgcactaaaccccttttggcgcggcccaatgcgaataacatcagccactttgattggacgaatgctacggagccccaatgagtatgtacttatcatctttgtcccttctttggtctgttatacgtgagatcaatatctcccaaaacaagcagaaatccattatgtgcaggtccagccttagagattagactatggaaaaacaacgcacccaactccaaaggcaagaagtcatgaagtagacgaccgataataaaaagaaagaccaacgtcctgagttcacaatatgtactagctcttgagagcttccaaccggcctcgcatctgcgcgagagtggcttcttggtcttcgaattcctcctcggcttgtggggattccggctccgagattttggccacaggtgtggtcgtgacgggctgcgcctgggcgagtttgccctgcaaaacttcctgcaggatcttctcgatctctgattctgcttccccttcctcatcttcaaagacagaagggtccatggtagcatcatcgaccatctcttcgataatacctgccctaactaattctgaagacagttggtgcatggtcgcagacaattgaggcaggcggaccagggtgttcacatccttcatgatcccagttgacttttgcagaccgccctggattttgcgcgcggagaaggcttcattgacctgcattcccacactctgcagttgggctcggctggtattcaaccgtgtggtctgtttccggatgcgcaccagctcccttgcaaagactttggtgtcattgttggcttgcttggcctgggatggatttcgctgagcccgtttagaggcattgacaatgtactggcgagtctggctgtcgctggcttttagccgggctagatcgcggtcgagttgccgtgtatttgtgcgtattaaagcattgcattttctcatctaatagatcatctttcattagtgtcatatttccaggcatgagccacactaactgcctacctgggcttgcgggtcgggcccaaagaacaccgccttgagactctccatgaatgcgctcttgcgggaatggggatagaaatcgatgataaaaacaagcaggcaaattaaaggtgtgagggatgtttaacaaataagttcagtctcggggtaaggcttgatcagcgattgacgctcatgcccggtgcatcgtagagataggcggggcaaggctaattcgttgactatgctgtcgcaatttttgaaccctcaggatactgtatgataggacttttctcgaagaccaggatcgctaggtcttcggttcagtcttcagatcagtacacgctgatgcgactgtcaatattcgaacctagtagaatggtaccttgggatgctacgctcagtggtatccgaccgggagctgaagctgagtcagttctgacgtaatacaatgtcccacataattcatgcctaaggcatgcttctaccagtttctacaacatagcaatagtaggttcgtgaatgagcttctcttacacttcttctcctctctttgaccacgttttctatcttcctcactttcttcacttcttccagttatctttccattcctaattcaatatgtctcagaccctgactcccgaaggtatgtcatgactgctctactgcttccccgctctcgaacgcgggtctgcacattttgcatagaaattactatgacgttatcaatatctaagactgttttgaaacattcgctatgccaattctacaatttcatttttaagtgagatggaggcgctaacatgctttacttttcagttacatgggctcagcgttcatccgactcggaccctgagcgcaactacctttacgtgaacatcaaggctgccgaggttcccaaggctgatgctaccctcaccatcactgagaagaatgtttctttcaagggcgtctccagaaagggcgtaacatacagcgtctccctggacctctttgccgagatcgaccccgagaacagcaaagtcaaccacaccgaccgcgatgtcgagctcgttctccggaagaaggagctcaaggaagagttctggccccgccttctcgagagcaagcagaagatgcacttcttgaagaccaacttcgacaaggtatgcttgggcgttagttctatttgattatggggcatgactaattgaatgcagtgggtggatgaggatgagcaggatgaggctggcgaggatgactacgccaacaacttcggcggtttcggtggtgagggtggtggtgaccccagtgccggtgccggtggcctaggcaacatcgacttctccaagcttggcggtatgcccggcatgggtggcatgggtggtggtatgcccgacctcagcgctctggctggtggtatgggcggtatgcctggtatgggcggcttgtccggtggtgagggtgccgaggaagatgatgtaagactgctcgcctataagtgatctgtgattgtctactaacgcaactctacaggatgatctccccgagctcgaagaggccgaaggccagaagtccaccaagatccaggaggtttcttaaacgtgaaatgtctactttctgcgaaatctatgacgatcagaaacgaaaaatgagagtgcgttaagacgcctacgggatgatagtttgaattatggatttgcttgggttttcgccgtctattgactgcagggctattctgaccaagcagctttgatccaaggccaacctttatacatggtagatctatctcattgaaaacatcccaatgattgatgaagcgtgatgagtggtcattacaagttttcacgtaagttatataatcgagtaattttacgcccacggtacaattgtatattgtaatgatcaacaggttgttaggcagtatagttttggtggatgttagtcttcaaacgatagcgacgaaatattcacatatgaaatgggctctgtttaggcattctccaggatattttacactacaatcgatgcatttacttatgtacatcatagcttgtttcatctcttctttagggttctgtgggagacgaaagtcatatatacggcaatagagaagttcaagccgaaaaattctccagatagaaattgcttcaatgtacccttctttccctgccgtactgatattcgcatacacgagggctatattgtgggtgtcgagggcaaatcggagtgggtatatgacgcatgtcgttgtgaagaacattctcaagactcaacaccgtacatcccaataatagaatagtgagaagatagtgaatctctagtaaaaacactctatataagtgtcttcatagataatcccagcccgcttttatatttcgagtcgcaccgtagacacgcggagtaaaaggcccgcaccatcattggttaaccaaaaattaccgtcacactctcacacccctcgttttcgagaacatttcactctgcaacaaccctggcatttctgcccgccactcgatatcttttctttcagaatctccctgtcattctttcgggtttcatcagcgtcttttctttgccaccttgtcacccattaaggcgcaccctggacaggcgcattttcacatttttactctcccccaaacccgcgacgtcacgtccgcccaatcgccgccatgcctcccaagaaagtcgatcagcctaagaagaagaaggccaccgttgaggataagtcctttggcatgaagaatgtgcgtcatacccttgattgaagtcgaagagcgggttcgctcgtgatataccaacatgtcctaacattgaatgcagaaaaaaggtggtgccgccaagaaacagatccaacagttgcaagcacaagccgcaagcaacaaaaacttagacgaaaagaagaaggccgccgaaaaagagaggcgtgaggccgagaaggccgccgaggagcgggccaagagagagaaccttgagctgttcaagcccgttcaggtccagaaggttgccttcggtgttgacccgaagactgttctctgtatcttcttcaagcagggtcactgcgagaagggccgaaagtgcaaattctcacacgaccccaatgtcgagcgcaaggcagccaagaaggatttgtacaccgacacccgtgacgagaaggccgacgaggaagagaagaagcaaaaggatactatggacgactgggacgaggagaagctacgtagtgtcgttatgagcaaacatggcaacccgcgcacaaccaccgacaaggtgtgcaaattcttcatcgaagcagtggaaaaccagaagtacggttggttctggacttgcccgaacggaggaaacaagtgcatgtacaagcacagcttgccaccagggtatgttttttctccacttatgtgtgcctcctacacaatactaacagcgtgagtagattcattctgaagaccagagagcagagagccgccgagaaggccctcagggacaaatcgcctttgcacactctcaccctagaggactggctggattccgagcgtcacaagctgacgggcacgctgacacccgtcaaccaggagaccttcgccaagtggaagaaggagcgtatggacaagaagctcgccgaggcacaagcacagcaggccaaggaggctactggtcgtacgctcttcgagagtggcaactgggccgacgaggatagtgagcccgaagagggcgaggacgaggatggaacctggaatttgtcagtcatgcgacgagagaccgagaggctgcgtgaacagaaggaagaggaacgtcttcttaagctcagtggcggggttctacctacaagtatacccacaactatacccgaagatgtcacacctgaagccgtgggttgagtccctccacatcctcacgatactagattcgtgggctcttgaggatccttctcccccggccacatgcaaccgtagagtttgtttcgtgttgccatggggtcggatctcgatgtcgagtgatcgctacaatcgcttgcccaaactgctggctttgtatgcaacctcggtcatcactaagggctcggctagtcgcctgttccttccaacctctatacgtatgtactacaaatgtcatgcgtagaggaaaaggtctaggctggctagccacgggggcacagaggcttgatgggtcttgtgtcccatgtgacggaagaatcaacggccgatatacctttgatagcacattgttattttgttggtagaaaaaagttcgtccattcaaatgaacatgatgccttttatttttctatgtatcagattgcacagcatggtaagatctaatgatccaagagatatgtacaacatgctctctataaacaacgcatgcgctcgttaaatgtcagcaaatagttttacagcgaggcttttgcctgcagtagcctcttctcgagcatcacggctacaatgtcctccgcaataccacgggacagctcaaacccgcgaccaccagcaccatacccatgaacgacatatcgatcatcagcgagcttctctgcctcgatgcgcagaccgccctcacgagccggccgccgaccgacaatatcgcgaatcacatcaaactggccgccgctctcaggtgtgaaagggaaccacttgcttgcgttgtcgaggagtcggtgtctggtttccagtgatgggttcgggtcccagttattcggctccttcgtgcctccgatgatggttccgccttcgagaggacgcgggatacagaaggaccacgagccatccgtattctgtcgagtaatggtcttagagacagggttacggacaagacaggtttgacctagagaacatgtcaatccacggattcagaacgtacacgttcaagcgcattccagacacaaccaacaccatcaccatcaccccatagacacatacctctgataataaacgacttcgggtcctcaaacccagttcccgagcagttcaccacggtcttcacatttcccgccatactaaacgcttccttcaaattggcgagcgtataccgcctcgtctcaccccccttaagaatgaacttgcgcaacaaatgcgcacagtagacaggcgagttgatcacatacgtcccatacttcacaccccacaccactccagccggcacctcttctttccctagaagttggaacttatccaggtgcgaatagacattgcgcacactcagctgatccagatactcgggtggcggcgcctcgaggtgctcaacgccgtcgaggaactggatgcctgcgccgggctcatcggccgcagttcgcttaagccactcatacgtgcgctgcgcttggttcgcttccttgagggcctgtggcgaggagccaggcaccgggcggtaatgggctcctgcccatggcgaggcgtagttgacggaagtttccgatgggaagtcccgggctacgagaaggatggattgcgccggagtgagatattgttggatgcatagtgcggtggaaaggccaattacgcccgctctggttgagtttgtcagctgattgttgtgtcttgtgatcttttttcctttttcgctttcggagcggattggctcgagggtattatatgtgcactgacccgatcactacaattgtgtccttggacatgttggatgttggaaacctgtcaccagggattaacagccactttataggcacaattatagacgtgaagccccaatgttggtctgggaatgagtcaagaaagggtccggggaaggcgataagacccccgcggtcatatgataaagacacatggcatgttccacttggaatgcaacatgagtatacaacatggttggattcttattagtgatgaagacctctctgtatatccctagagttggcgacgttggatagttatactctcttaatccaacagtaggtgcacctatttttctacttggcccacattctatgtacggggtatgtacggagtatactccgtagtaaggcttcttttgtgactcgtattattgcaaggatcggatttgatccagtacaccccgtacgacatggaaattctttctttcattgcccaagctcgattgaaaactctaccggtgtgcccccgataccctgatacatactatcacagggcccaagctctaggatgttcgacggtgcctttttgtgcagggatgactgcatatctctgcatttctgtcacatcacaggaaccaagcagaaccactctggagtactccacactctatacataagcctcgtggaaaagggaaaaagataagacctcggaaacactatccccaacatgaaacttctgaacaatctattctccgaattccagacaagacgagggctgctatagggcggtatagccaggttagcccaatccctacttgattgcagaccgtcgtggaatggctggatgagtgcaggcattggctgaggggtggtcgtgtaggcgccgagggatcagcagtgatggacggtgattggccgagggaggtgacgaagctgcagctcgagaacaattgcaattccaatcacatctctgtctcggatcacattattattattattttctttctcttttacgtctcgctaagtttctattctttgaaaattgggcggttccttgcagttgggaaaagatcaagttggtcaagtcggtattagggttatctatacttcaactatataaaagtactagtagacggttggattacctccgagtgatcgacgtgcaggacactaaacatagtgcaagggccagggattctctttcttcaagacgcccgtgattcgggaacttgtctgcattgatctaagcagggttaactttttttctttgctcggcttctgcatgctcgttggtgcaagtcccgcaggacaacccagccaccaagaaggctcgatctcactgtctccgctaataatgtgttggatatggtgcctttaatgtcgggtcctgctccggtccctctgtaactgcagaaacgggacagatgtatggtccagttaggaaatgaaagcgcccagcaattcccccgagcgccaaccattacttagtagtccccgtattttcattttgatcgactatcgatgctcccctcttttttgggattgttctatttaccctacgggcagcccgcttatatgtccttagtctattatatagaaccaggcttgcatcctgtcacaaacttaagccccccccgtcacgctatgtgatgagaacgtgcaagcgagtcgattcaattttctagtgcttcaagtgtcacacttgaatatccattttctcttttttattctttcccctcccctgttgcaacggcttgcgtcctttttcttcccctcgccttctcgcatatttcttacatatcctgcgtctcgcccttctcatttatagggccctttcgagcctatttcatttcagtcacattctattccttgtcaggcgctaattctaccccgaacccaaatgcgccgtgagatatcctgaaaatccccttctttcaccttgaccggtactcagggtcgtggccgattagaaacctacctggcttaaacagagaggttagtggcccaatctcgtttagactcattcatcttccctcttgttctggtatatatcatttgggacttttgtcttgaacaagtccccttctagtaaatcaatttccccgcaaattgtctcatatgcatccaatataatggttgagttgacatggaataggagcttgggggcagaatcacgaccttcaaggacagtcaaagcaatggcacctgcaccgccagctgtcaagcctcgcttcgtcgcctgcacctcaacggcgtccttattcctctatgcccagggttcaacaatcctatgtttgcatcatgatacattggcaatcgagcgacgttttcagagccaccaggagaacatcgagtttatatcggtggataatgtcagcgagcgaggtgctggaagattggtcgtcagttacgatgtagggcagacggcgattgtctgggatatcttcaccggaacggagattgcacgctttgcttccttcgatcatctgcaaatggcatcgtggatgcgtaatggcaatcttgcattcggtgagcatcatcatttatatgttatatggactccgagttgctgattaaatagcaggaaatagcaagggcgaggtgatcctcttcgaacctcctacttcagagcacatctctgcgcgcaccattttcgacccaatcacagcccttgcgcccgccatggattgtcgtacttatgcaattgggtatgtcagatgaatatgatcgagagtaacacttagctaataagtttcagatatcagaatggttctatattgatcgcgactttacttcctcaatttaccgttgttcacacgctgactactgcgcgtgaaccatcaccaattatttccttggcttggcatgcatcttcatcgaaacagaagtcagatatgctggcaacgcagtcgtcgaatggcgatctacgagtttggagtgtggcaaaaccaccagggaaagaggcacctcgggtgattagggttttgaaacgatctgattcaaactcttctgatcccaaatggatgggctggtcaaagaacggaagacttgtgcaatatctggaagggtatgcaaggccctaagaaaatgattgagattgtactgacatgtgattatagagaaacatggtcttgggatgttcgaacaaaacatgttacctacgatccaattcctacaatcgatggtgtgcgaggcatcgcaaactatggtcctactgcgactctattcaccatcggcccccagcactccgtccagcagtatgatttggaaaatccggcaatggttgcaaatgtgcaacatcttccagtcattccccggccaggcacagcggaaggcagtcgatcacaaacgatgtccccacggcgcttgcaagacgctcctgatatccgagagccatcaggtgcggctaggcgaacgccatttgatgcaaacagcattgagagcctcagacagagggctgatctgactagccctgcttcatctcgcagtcggacggaatcggtgagctcaaaggcatcctctgggaagtataatgtgaggcctttctctccgccgagtcgttctggtcagagcgctacaactttttccatgacatcgactgatcgtgatacaccacaaccttctgcttcattcgcatatccctcctcagtctcaatgtcctcggtgagaagctcgagggcggcatcacgattgcggaatgaggttcatctcagccctgctgacaagaacattgtggatttattcccgttcactcgggcccgcttgattgacgtgccttataaacagcagccgcctatcgacgagacgaatctcacttcagatgatcttcggctccaaatgttgagcgtggtgtttggctgggatggagacatccaagatctgataatagacgagtgtatgtattgccctgtatcttccatcttggaaatagctgttgacagtccttagtgagccgccacgccgtgggtagtcagagtgctattctcttgacccaatggcttggcaagaacgatacagatgaaatggccgcgatgattagctctgggcaggtaacatcgtccgactggatgattcttgccttgagtcaaatgagcggccaagcgcaggcaaacaaggtcggacaggcatttgtacagaagctgcttgagatcggggacatacacacctcggcggcgatcttgcttggtctaggggacagcaacgacgccattgaggtttacgtttctcgcaatcactttatggaagctatcctcatgacatgtctcctgttcccatcggactggcagcgccagtcatacctcgttcgccgatggggagaacatgtcgttgctcactcccagcaacaactcgccattcgctgtttcatgtgtacgggagtggaaccatcagagccgtgggcatctccatctgcccaacaaacttcatcttttgcagagatgatttgcggcaagccttctgtcgcctcgcccgaaccttcgccggccaatatagtgccaccacccgtccggccaagatctacatctaactccaaaccttcactgaaaacaccagccctgaagctaattacttcatttgacgcgcagccagggcgtttccgcttccctggcttaaagtctgatgatcgtacgccaacaaatgcacctggaatcactccaattgctgaatctgctgttcccgagtcggcaatgtctcctggtggatttggctcttatagactgaacaatatccaaagcctgaatcacgcaatgacttctcgatcaaacactcctgctgccaatcggcgtcgtctaccatcgataggagagacaccagtggatgtgcacccgccaagcttctcacggtcaaactcttacagccagaatgagtatagctctacctccgaaaacgaaatgagtggacatgagcagagcaaggacaacaacagtggtctactcactttgtcagccacgaaatacaaccccggtctagactctatcaagcccagtcctcagactgctgtgcagggaacagagaagtttgccgcaatcaaggggcttccatcgccagctgctggtgtatttgaggctcttacaagtgaagaccaccgtaacgggtcccgagatcgaaaaccagatggccttcaaatcgagacattggaaggtgaaataaacccgcaggaccgctccgatttgatccccagcgctaaaagcaccgcttcgacattgaatagctacgcttcggccaggagcccaagtgttagtggccgtagtattgatcaatacatcagtagccttgatgaagcgaactatcatgccaggaagttgcgcccacatactccgggccgtggaaggcgtaacccagacgacactgccagccagagctcaaaagtcaatcaaccacgtgagggctctcgagatacccgcggtaagagtgagcgtcggtacattcaacccgccaagcgctctccttcctcgccggtgcccatgtctccggaagagttggctcgataccacaccgaagagtctgaaaagcgagctgaaacaaagtcaaagtctcgcgccagaagttctagcaaggtgagagggccaggttctcgaaaccgtcagcgctcctcaagtcggcacactgctagccggctgggtacagacaaacgaggccgcagcaatgaccgacaaggatccggcgttcgatcaccgtcgtcgcctcttcctatggcgtatcccacagaggaactttctcaggatgtcgataatcctttgagacttgttgaggataaccaaaagagactgcgatctcgccaccgaagtgctagtcgacgtcgcgccgataaaggaacagcttccaaaagagatggctctccagagaccagacataaaacatcgcaaagtctttctgtgatccaaacaggttctactacatcagatccctgggcgcagcaggaatctgtgccggagcagttgagcagcaaggtttttggtcaacaagacacatccaatgggtcttctaataggaaaccaagctcgacagccaatgatttccaagacattgcgtccccaaggacaccattcgtcaccctcgcagagaaaaagcgaagagagattgccgctgctgaattggaagcacgaagattatcactcgcccgcaacccgtcagcaccaaatatacccttcccgggcgagctgcaaagcgcaaaaagtccccttgagggctcccctccgttctctggtacaggttcatacttccaacgggctccatcgcggaacaaggcttcccagaacaaagcatcacttgactatcccagcagttctgactcgaactcttcacgctctggaatgcccggcgggcttccggcaactcctcgagccatgcggcatccaaagtacggcggaagcggacaacacgaagaccgacctccttctgtgcctcttattcctacagacaacagtttcttccttagcaatgcccggtatcaaggagatgtcgaaagaatcggaagatcgatgtccgtccccgtgccagaaggacagtacaacgccccttcaatgccgaacgacctccccacgcatcctcgatttaacccagctctcccccgaagccggtccagcagccgcagccgcgcaaagggccataaccgcaccagctcaggcagctatatctccagcacctccccccacgttcaagtgagcatcgaagagaccatcgagcatgcaatgcagcgaggaccttcagcacaatatgagacaatcccgcctccaccaccccctcccatcctcccggaactgcagcatctcaacaccccacctccaccacccccgttcccacgctctgcaacgcccatctcgccccgcgagtcctccgcgactatcgacattgccatcgacaacaaccaagacctcggtcgtctcctccctcgcgccatgaccgccgccccggctatcaatgtaggcgaccaaggggctgactcccatcagccgggtagtccgcgtacgtcctttgaccaccgccgaaaccgtagctcaaacgagagcttcacgaacaagctgcgtagcttgactcgtatgcgcaacagcagtcgcagtgtcgagccttacatgcaggcgcatgaggcggagatggagagtctgaatgctgggccgaactcgaactatgttctgtcgagtcagagctatgtcgcgccgggcccaaactatgtttaggcagttaaggcttggctggctgacgagaagtgttttgtttgctttatatatcttttgctggtctttgttcttattcttctctcctctcttttgcatcatgagcccccttttttgattgttttttttatcatgaaattgcaatgtcctggatttcaacgtatcacgcatgtttttcaatgtcattggctttggtttgacattatctccgttcacgggctcataccctctctcgtcctgattgattgatattttccaagttatatgacccaatttatattccaaataccatatcctgtcatcaaccccaatcctagggctgattgaatgcacaatttcctagtcactgatttcagattttctttttcaagattgcagacagcgatgtctttaaagatcttgtttccattggtttttgctctcttggtcggggtctccctagctaaacggatatgcctgcaaaggcttaatgataatggtctcaattgtttctagatgatttgatatagaagtagctgttcagaggctaaaaattacacacttgtacatgcaaagatcgacagaaaaaaggcccgaggcatccccaagatcaccaaccgcggtttcgagatgatccatcattgccaatgttcctttccgcatcaatcatgcgatcaaactctgcctgtgcttgatccctctcagtcttctgagtggagtcatacttttcttggtcactctggccaaacccagcagagagagggttcggtgaaggctgtgacacgggctgctgtcgaggctggggtcgtgctccggcattctgtcgtctgatccggtcccaggcactgccagtactcggtgacccatcaatgtttgtattccggtattctgcagcggtagggctagcatcgtcctcctccaggatatccaaagctgattttgattcgggttgagtgcctctgccgcgtgcccagattgcaccaccattcgaacccgattgagacaactccgacgaaggggattgagagctcgcctgggtatcattggtgttcatgtattcagagtaagaattcgcctgcgcgggagcatcgtaagacgcctgctccggttcgtacacatcgtcgcctgcatatccaccaggcatgctgatggcctgtcgcacctgggagccaatgtctttctcgccactgcggatgctgcggacacgctcgctagcggcctggatcttacgcttgcgcacgtcctcgggtttcgccctgcgtacgtcctcgacgaaccgcttcaatcgcgggtccgtcaacattcgcatggcatcttgggaaaccgcgtaagcgctcgatgccatacttccaagactaacaataaagaccagtttgaataccgctgtgctgatgttgcctcttaaggcattatcggcccacatgttacgcaccgtattcaatagtgaggctggggtgggattgctcggaaacagtggcgacttgcgtgcttggttgaggaggtatgctgttccgatgaatgagcttacgggtatacccctccgcgactggtacaggcatcgcgttgagtgctcaaccattgcatcgaattcgtcttgggtcggggatcgtgctgtcagcacgtagtggttctccactcgctcattcactgtgtttgagacctttcgcgtccaggctgctgtgccgaaaaatccaaagtacaatgtgaaaagatcaggcctcacaattgtgtctggccggagtttgaccttgctatatttcgcgatcgcggggttgtggccaggaagggatcgggaggagtcgttcggagaagtgttgttataattctggcctgcctgcggcgaggcgttatcggagctcatggtgagtatccgagtgttgaggaaggttgaggtgagaggtgacagcttcgaaggttggctgggccgtttactgtgacgttacgcgctgacttagcatttgcataaaatctacataactatccagccgtatacaatttgaagtaaatcctcaatttgaatcccagtcattcgataaaaatgcaatatcagtgcataagcatgtgctgatgtcgtattcttactatccttgttataaattctgttgttctgggtttactggtcgggttcaatgccttataagaacccagaaagcctccgcgaaacctcctaccacttctcaatataaggtcgcaagtccaactcaaacgcaaatgtcgtgcgtggctgagtatgcaaataccaatatgagtccgcaatctataactagtgagtttcagacacaaagcaaccaattaagtcaaacttacagcgtcggggcttattttcgcatcctcatgctcaaatacccaggccttggtacgagggatatcaatgataccatcaataacagtatgagagacatgtataccctgcggcccaaactcacgagcaagtgactgcgccaacgcacgcagtgcaaacttgctcgaagcaaaagcagcaaacttagccgatcccttaagactggcagtagctcccgtgaagatcagtgtgggcggatactccgacgattcacgagcttgcaggagcagcggaagagcccgctgggcaaagttaaaggcgcccagtctgatatcggaatcacagtgtcagcatggtccctaggaacaattcggactatatcaagcttggaatgaagcagatagagtgtgtgagcataagagaaagcaaatacgtacgcctgtgacctgagtgcagtcgtgtaatcttcttctgttagctcaaggaatggcttgaccacgaagccgccacctggattgaaaacagcagcagctacctttgaggaagggtactgcgcttgaatcttgtcaaatgcggcattgacactcttcgagtcggagacatcggtactgatgccgatggcctggccgccgctggaattgatttcttgaacgactgggtcgtaattttctgagtttcgagccagaactacaacagagtatgactttgcaaatttcctggcgattgaggcgccctgttctttcatcagccaatcctgccttatatggacagagtagatgtagaccgtaccgtgccagggccaacgccggcaatgatcgcgagtgctttggaagccatatttgattgagtaaagttatctatgaatatgaatgtttgcaagtctgggttaaatgagagaatttaaacaactaaataatggtgaaccttagatatcaccgcttagaaatgcagcggggattgatcatcacatccgcaaatgatatcatctgcagagaatgggactggtgtatccccgcaaagataacatccaaggggaaattaggccattggccgatgaataatcctggatatgagctcattttaaggtctagctagacagcctcttggggagactaagattgttggcgaaataattccaaggttggtatagttcgagatgtcggcctcaggcgcttatcgataagacaaataaatttcccatcgaatctccgactctacaactctcaactccgcatcagacaactaagatggcggattcagatcccttactgagtgatctctgctcaatatggtatgcttatgtgcatttaaattctggtacaccttgcatctaacctgtgtccgtacagccataccaatcctcccaagtaccgctgtccacgctgctcaacacgcacctgctctctaccctgcacacgtcgccacaaactctggtcgcaatgttccggcgtgcgcgatccagccgcatacttaaagcgccaagaactaaacactccatctgcgttcgatcgcgattttaatttcatcacgagtatcgagcgcactctcgagcgcgcggagagagaagttgataaccgcgggattgatcttgcgggtggtgcccaggccgacgatgataattccgaaggttcccaacatccgactactggccgtaaaaggaagcacccgaaccagggccttgccaagggtgaggctgcgttcttacgcggtgccgaaactgctggtgtaaaagttcttcgagctccaaagggaatgtcgaggaataagcagaatgggtcgcgtttgcatcccaagtgagttgggaatctctcatatcttttgattcggaatttgtactgacgtatgtgtttctcaaggcacaagcgtcttgcttggaccatagagtggatcacgtctgatgggctgaagactattcgtgattctgtcatcgatacatgctctgttgctgaagcctataaccgttgttgcccacgtccgaaggatcaagagccagctaccaagccagtgaaggaagagaagaaagatttggacacccataatacaactatcgctgcacccggtgatcctgtcacgacagtggttgaagaggcagatacaaaacaaccatcatccccaaacaaagactcaacaaaagaaccagctgatgactcaactgagcaaacggataaagtaccaaatcagaccatcaccccccaccgcggtctctacttctaccttcaccgtccgcgaaccacaaccaaaaagcctgtcttagctcctctcttgcaatcctcgacactcaatgctgttctgcgcaatcggacagttctagaattccctacgatttatgcactgctagagtcagcagagacactgttttcagacaaagataactctaaattcatatctgaagaagagtatcttcacactgctggaccagatgagataggccagtcttctaccgcgagtgacgatgacggtgcggctggaaacaaagtactcgccagttcttcggtgaatcttcaagatgttgatgagaacttggtactggaggtattgaagaaagatctatttgaaccagtctcggaaactgagccagtatgagttattccggcatgaagagagatatcagaagacgttagccaatttggcacatctaccagacaatgtacgatacatagggacagctaattatcagtcaattgtacaattgtacaacgggtcacctctcagaaaaattatcaggcttagatgcagacgtattttcctgaaaaccacagatcctgctgatcgtgacatctcgaccaaaagaggaaaccacgatcagcgcggcttctgtcgagtcaaagattcttcgagttcaccttcactccacccgggaccaccttgggaatatcaaatgctccaggatcatcatgaaaactaacgttttgtccttcgggatcaccgtgatttatctcggcacggtagcatcagccttattagttgccagaccaccgtcgcagttaccagccaagaaacgtccacagggatgcgattgctacacaatatccgggcctgatccgggatattttcagcactacaaggtctgggactttcgggcagtggatttgaagaaacatgccaatctcaatctgtcggagcccattgattatgacgacgaggactgggacgatgacgctgaggccgagggccaagaaccgcaaaatggccgtctctcgcccggagtccataatgagaaagacccggaccccagatcgctgttgttctacaaaacctcattcgagaaagactggagcagtcaaaactgggaacgtcgaggcacccccatagccccagtcctcatgataaattcaaagcacaacgtcttcctcacccgggactcggaccagaataatcctcacgcgacgtatctcgtcctgcgtaccactcgtttttcagaatacacctccaccgcggaaatcgagactcgcatacgcaatatctaccggtgctcgctgcgtgtccggctgcgattattgccagccggctccgtcgtatcgcaacctcctcagcataaagaatggccaccgcgggatccacaacggcatcccaccgtgcccttgaacaagacgattccgctccgtgatagcagaccacctgatggcgcttgtgctggcatcttcacctaccatgattcgacctgtgaatctgacattgagattttgacgcgagacccgtcacatcgcgtgcattatgccaatcagcccgattatgattttgccgctgatcacgagattcccaatgcgagtaccattgccgatatacctgtcccatggacaacatggtccacgcatcgcctagactggctctcggacatgtcacggtggtatgtcaacaatcagatacaggatgccaaatcgtacagagttcctgagttagagagcatgattgtactcaatctttggagtgacggcggactctggacgggcgacatgagaattggcgacagtatatacatgggcattgaatacatcgagctggtttacaaccgttcttctgatgctttcagggccccttatgtgtctccttcgcaaaaccaggcccctcccacgaatggttcttttggcaatgggaatccattggagccggatagaaaggacgaaaagtgcaagccaggtaggcagggccgcgagtgcagaagaaagaagtggaggaacaggccccttcatgaatcctgtcgaagaccatgtaacattgatcaactctaggacttcccaggcagactgtttgtattattatcggttttattcaatattttacttttagattcctggtttcgactggcttgcttgttctgtcctctagtttagacaagatgaatgttttctcagagaaaatagatgtcaacctaatatgcttcagggctccagagcccaactttactatttggatactcattgcttgtgtttagtcctgatatcggattgaagagcaaaacactaacataatagaaatacatagactctacaataagaaaggagatgctattcaggatgaagaaaacctcccaagggaagatagaagaacaaggaaaacaaagaaatacgaccaaaccagttcacgaggaagggactgctttgtatcaactgagtcaccaatggtggtgaccgtggggtatcattcattgcaaacatcacatagaaagagcgcgccaaaagaaaattcattatccttttctcatcttccccgtgttgttcgccttgcgcgccagaatatcaaataatgtgtaatgatgaccgaaaacgccttgatgagggtgcttgatatggataaatgtgggtgggggatggatgaggtatgtgagattatgtaggagggtgaaaacttcaatgcatgagatcgacgagagagtgcgatgcttctgtagccatagacaaactggtctttggtgttcatttagagcaacactgcacctgttgctttgtctcgtgggttaaactcgccgtgaagaccaccgttcatgagttcagcaacaatctttctgcgaagaagtgtgatgtggcctgggccaatggcagtcggctcaaccccaacagtaattgctttggcgttggttaggaggaaaacaccacagtcacttccgttatcttgctgagaagagaccgacggtaggacggtccactcctcatctttgtattttggcccaagctccccacgaagccattgcttgacgttttttacctgccgttgaccgcgggatcccagagagtcgaaatactctattgtacggtctgctggtcgaataaccatgagagtccaatgacttgactcatgtacagggatgaagactgtgtcgacattaagcagtccttggccaccgatcttggcccgagttgcccatcgtttcacgccctcataccccttatcacgaagggtggagtagaaaaatgtgttgaaagtgtgaaagagcggccgatcgctgggtccgaggttcccatgcgattgacggagataatgtacgagtaaaccaaggtaggcattgatgatttcgtcattgagccaggcctcaggccgaatgcaagtgatgatatcccgttggtacaaattacctcctgctaatgatgtggcgacggcttgtccttgtccactctgcacggcgcattgaagtttggtaagccactcgggcgagatcagacgtacgggttgaccctggggtatcactctgatcggacgttggagatcgcgctcccgctctaatctttctttctcccgcctctcgaattctgcctcgtaccaagatgcaatgcgattggcaggaatcggcctcctgttggcataaaacaactgtacagcggaaacagggccatgcggaactcttgcatcttgtcgagcttgttgatcccacgggtcatcaatatccataagatcatcttggacgggcttgggggcttcagttggtctcggcgatggaatgcgcctagcgctcggaggaggagggatatatggcggtaatctagggtggagatgtatgccgagatccgtaacaagtgctggtgctgcgcgagcatctatgtccataaattcccatcccttcggtgggatatcttcctcctcgatagtcgcgccttgtgatacaacaagtgtaggtgattcgggaggagttaacgggaaggctcctgggatgggcaagtgagagttctccaaggctaggctatagtttagtatatgcgacatttatctccaagtagaggccaccataccatcgcgggcgttaattgaaggctttagggcctcgaagggattgggaatcttgagagagggctccgtgtactcagtgagctccgtgggctttgcaggggagacgcgccgcctgcatcgaggccagcggaagaaacccatgttgctgcgaactctgaagtcacctcgaacgacgggagtaagaaagatctactcgtccggtgacgcgctttcgagtaggttggcagttgaacgaacgttgagggcgtgaaaagggaggaatgagcgggtagatgaagacgaggcttcaagatccatcattgggcatgactggaatatctatcccaaacccaaaatcgaaggcaaatactccgcaaaggaagaggtatgggaacattatgagccgacgcgatgcaccgggttctttcatcattctgctgactcagcgcatattccgcggcccagcctccattgttgcgttgatcacttcagtactctttgatagctgtttatagagtctgccacaggaattattagatgaaacatcaaagcaacatgagactagggagaagaaggaacgatatttagcagaagttgaaggataacattcaaaggaactcctacaaaaacgatatacaaacaaagagagacaatatgtacggagcactactccgtacacaactcttcacttgaacgccctttgttctttgcctctaaagatcttatatgtcgtggttcatgcggctagtctcatacctgtatttgagcaggatgtttgactagaccgaacaacaactatgaatattgctttcaatgcgtatgtacatggataacgtaaaggatacttaaggtgacctgttccagcacagcctgctgagctaggagcaggccgaggagttagtggaggtaagggaagagggactgcaaggcgaattgcacttttatcaatacatttctcatcctcgttatcgggttccaagtccgattaggtcgaataacaggggtgcgacttcaatgaccacccatggaatacctaatgaggactgatatcagcaaaggttctgtcaaaatacaggggtttcacatacccgcatatacaactagttttgtcactacctccacatcgtaccgcacgcggggcttcttgatctgtgagaagacttcttgttcatcccgctccccagcctggatgtctagcgaggggaaaggtgttgttggaatgtcaaaattcacattagctgccgatgacatagggctacctcttcccatcatgtcttcataatcgtccagtgatgccgtctttcttggccgcacgggtgttccattgagcttgttttgatcctctgcgaccggagagggatgattgctcccagattgactctggcgtcggcgtttctcccggtacgccagggtctcatacgcatcagcttctgactgaggaccaattgaaatggctcggcggcggggatggcgcatcgtggtaaggatgtctgggatgtcagaaaagttcggaaaaacatcatgatcctttaggttatagggaacggtggtgtatttcctaggaataggtcagcataatgtccactggcgggaagtacagtcgaattcgaacttacgatgcagtagtgaagaaacgtcgagggagcaaaagcccgagcttctccagagtgcggaagataggtggcagaatgcgcagcagagcgggctttgttgcaattctccaagcaaacacacacaaaacgcccatgaaaagacgaatgacagtcttaatccaacccactgtcgccagatcgtagggaattgatccagacggataacccacccagatatcggcgaagtgccatgaagacacatccacgcctagcatgacacctgcaaatgcaacactatcgtcgaagcatgggcaatcatctgccggctccgggtggatgcggacgagaaatatgatgagaagtcccagcaaggaaatttccttcggcgaggcggacaaaatgaattcctcaaaggcaggtccgtaatgaaactgtatgagcccgatggcggcacccatagcacaaccaacaacacagtcgagcatcccatgcattccgcaatacagtcgacccaatacaatggacacgacatagacgtaggtgacggcttggagtaagagggtgacctgcgtgccgagagttgaatcgggtgaaccaagcagggctaaagcataaactgcaaccgaaacagcgttggtggaatgtgtcgatgggaaaccatattccagggctgcagaaccggacatggtgattcgctggagtggcggggacagagggcgaggaagacagagtaggtctttgaggaagccgctccaaaagacgcctgatgctaagatgtgtactaatctgtagacgatcactatcagccacagactcccacttgcgcttccaatttcagaaagataacgtacccgcgacccatactgggagagccacaccagaataggaagggtaagaagaccatgaagaacgtgtgggtgccgaggttggccgtgaatgcgaaatacgagtcgagagtgggcgtgcggactttctcctgtacccaagccaaatatggcgtctcataccggatcaatgggatgagcttttgtcgcggccaataccgccagaggggcagtcggttcgaatctatgtggcagacgtgcgagggttaggacatcgcgataagccacaggtggatgaaaatggaaccaatcgcatacagtgattcagactcttcagcccagcatcgggctggtctttcttgctcgtgcccatgatgcagtgttatcgattcagacaatgtcgcaatcgaatggattccatggaatggacaggccgctgcctgccagtccgtttgaaaggttgagggatatagggatcagaacataaggagcgaattgaagttggatcgaagaaaatgatataatcgagaaactcgaggttggatcctccaaagtggacggggagatcatccgcggctcaaacccctgatgcccatgtgtgtgcttagtcattttgcattggggctggcccgggggatgctctaacggagtatatacggagtccgaggcatcgatttttactaatttgtatttgatgttgggatagagtctctcagctgtagacctatattctgtacagagtacggagtacgaagtagagggtggaatacatatttatgtcggatatatgttttgcaatgtatacctatctggatcgtccttgaggtcgaatacatgtcaaatcgttctgatttagattttgaatgactatgttgtatgcactttgctattttcaactggtttacgaactattttgttcattacctggtgatgctactccgtacatactagttatgtggctcttagcttgtgctgtgaggatcctcttgcctctccaagtttgatatactctgattgacatctcctcggagagagcgagataaagccaagaaatataatgtaataataatagtatataaagtcaactctcgtaccttggaggctgtttagcgcgggacgtcggtcttctccgaagatgacatgcagagttagtgagtttttagtttctattctattatatggcttcgccacaagatttccaattaaatgcttggatttacaacccttctccagatctgagcctatactagacacaatataagttataatataacttataccacgcaaggtagaagaaagagtgtgatgtttgaaatatctacaaatcacatgacttcagataaacttgtataaccacaaacttggatatgccacagctgaacagtggggaacagggaatatattagcggagtcaaacccaaaacaggatcaagataaaccagtcaatgtcagaatacaggatatagaggccttgaatcgtgggaagcggagccctggcgtcatggagggacggccgttgctatggtagcccaggggggtaaacacgggtttcacggtttcacaggtctcgccagaccctcttgctctatcgatcctctagatcatttttagatctatcttctcctctttttccctcctacatctcattccatatcatctcttccctaccagacttaacacaacgccgttttcctctgtatcacattacaaacgagggacattcccaaggtccaacccctatccctgcatcatgagtgctatgtacgaagaccaatacaatgcagcatcgcgccgtcgctctctcgttacccctcctccatctttgacaccgcgtcacagtcgtacgcgcagcgacagcatccgagtcagccacggcacggccagcaccaacaccagtgtctccagtggacggatgtccgaggcgacaaatatcactcagccgccctcattctcaaaaaagtttgtagtggtgggcgatggcggatgtggcaagacctgtctgttgatcagttattcccagggttacttcccagaggtacgttcggcctacgaggaaagatgtgtccctggtgctgatcatcatttagaaatatgtccccacggtgtttgagaactatattacccaaacgacacatcgggcttctggcaagaccgttgaattagccctctgggatactgctggacaggaggaatatgatcgtttgcgtccgctgtcctaccccgagactgatcttctatttgtctgcttcgctatcgattgccccgcatcattggagaatgttgttgacaaggtgagtcctcaaaatggaatatctttgctcgatttgtctaacatccctcctcttagtggtatcccgaggttctgcacttctgtcccaccacaccgattattctcgttggcttgaagtccgacttgcgcaataagcgaacctgcattgaactcctcaagacacaaggcctgacacccatcacaccagagcaaggcgaaaatgtcgcccaacggatgggagcaacatacgccgaatgcagtagcaaggagatgcgcggcgtggacgaggtcttcgccaaggccgttgactcggccatctcaatcgaagaacaaggctgggtagccccgcagccggctggccgtaataaccgcaacaatcgcgccagtgccgtgccttcagggggtggaggcccccgccccggcaagaagattaagaagcgcacttgcaagattctgtagattgattctactctatctgtatttccttccattctcgacatcctttgacctttttttctctcttggccggaccacaagcctggttgcttcgtcggcttgcttgcccgctcgcctgtgtatgtgacatgtcgccgcaagctggacaaagctagacatgactttccaaacccttctctgttgtatcgatacgctgcgcggcccttacaatgatctcgattctttttatttttgctggaggctgtttcttttattccacctttgttccccgcttatttcctttttttggcctttgtcatgacccttgccctcgttccatttgatgtctcttatgactcgggtcttagccgttttccattggcatgcatgggaccggtgttctcgtttgtgttatctgatatgttctgttggcgaaagcgacgtcctttgtgttactaaacaatacatttgacctattgtgtttattaatgccttccccgtatgattcgtatatatttcccccgggaatctaactggaattttgaatggtatctaagaaaagagaaagaaaaaagaaacaaaacagcccgacgccgagacccgtcatgcagaccaaaatgtaaaataaaccatcacggcatggctgtcgagtcaccctcgtcttcacgctttattcccgacttactcgcatcactctccccactgaccttccgcttcacattgccattgccagcctcctcgccttgttcttcaggccggcccatgaaattctcaaactgggaccagagagcttccacagatccaaattcattgcccacctaataataccattagtagatgctctccctgtccgggtggtgaaccttaccgcaataacactctccaaattccgattcagacggttgatgttttgaagtacttgttccataccctgcgcgaataaattagcatcggttgcggcggctgataaggtgggaagttcgtagatattggtacataccactgcgatctctcggacgagttcctcgcgctgctgctcaaagactgttggggacgcgcgaccgccagagcctggtgtctgctggagccaggccatttttttggcttctgaagactagatggcgacgaggaatggcacgacctggcacgttcacgttgtgctcaaagacgcggcggttggggtttcggggagcgtcgcggatgattccttggcgttggatgtttgactagacgcgggcttttgcagggaaatatccagttggagtcacttcacagttacagtcgcagtcacagtcgttgcagttggacaatttgagatgaggttgatgtggggcaggtttgataagagataaatatgtatggaaatggcgatctacttccatcttgtatgtgacactctaccaaatccccggactcgtctctgaaatctatatgattgaactgaacaccgattctatatttctcctggaagttttctggcgttctggtccttgaagacgtttgcattgtgctcggttcgactcgagaagaaaggcatctttccaagagagcacacatatttatgatttcttcgagcgagcctgacgaattcttattctgagaaacaacaggctaccccaggcacaaatttataaaggtagaccatatcaataattgtatgaaggcaccaaaatatttcatctatctcatcctgatagtatcacgcgatgcaaccgttgatataataccatatcctgcagcttagtggcccgcaatcaagagcaaggattatcatctttatctacttatggtaagaagaaggcttaggagtcaaaggaagtgccgtatagttacatccgagttctagacttatgcataagccacacggaggccggtgtgcatcgtcagcataacttggcatagcgtgggcagaagatgtgcttatgcttgatgcattcattccgagacttagcgccgcggcattggaaaggggtgacatggagaggcccacaagtatatagaggcgcagggcaatttgtggagactcggatacagcaagctccgtgaggttgtcaaattgaaaactccaaataaagtccgggaaggtaagaatttcatcacattcgtactgtgtgtgagtgacagttgagctgagtacgataaatgagagcttcggagagaatcagacgacaactctagtcgggaatgtcgtacgaactctaatgttcagatgtcttgagtttatatatccaaaaatataacaggcttcagcgtttaggattaggtttgaaaatcccctgaatatggtgatatataagtgtccattactgtgtgcaggccctgttaaatttggtttctaataggattagacaacacgctcaacgacacaatggttgaagtcaagtatatgggagaatatgactacataccgtcaataccagctgccgtgatatttattggtatatttgggatcttaaccctcctgcattgttggcaagtgttccgtggtcggacttggttcttcattccttttatattaggaggaatatgtaagtaccagctcaatgaaccctttccttgggccttttccggttctttctaacacaggttttctgcagttgagattgttggatatatagctgtaagccaatctcgatactcgatcaagcgaaagagggaatatgctcacagctctagcgtgtcgtttcttccaagcaatacccgaattataccattccccctcttgccatacaagccatttttatcctcgtcgcgccgtcactgctcgctgcgagtatttatatggaactcggccggatcatgattgtcactggtggagaacacttgtcaccaatccgacgttcgtggttgacgaagatctttgtggttggagacgtgatatcatttcttgttcaggcaggaggtaagacgtccctcgacgtatgtgcgaatcttgcatctcctgattgactaacgatatattccaacaatgcaggagccgggatgctcgtcaaagccagcacagcagaaaaaggcggaaatgtgattaaagtcgggttgattatccaaattatctttttcggcctcttcataatcaccagcatcattttccacgtcaagcttgtgaaaaacaggtcaagagtgctacaacagcacgaagtcccctggaaaaggcaccagaccgtgttatacatcggcagtctgctgattttcgtccgttccatcttccggtacatcgagtacaaccagggaagtagcgggacattactccagcatgaattctggagttatattttcgatgccgctcttatggtgctggtaatggccgcgtttaacgtggtgaatccggccgagattagcaggttgatggaagggagaaaaggcgaatatgggacggagctgattggatgattgagacgactgccgggaaatccccggggatattcaatcagaccgactcaacctgtattgaagtgatgtaaattataatcttgatagatcgagccagagtccatacacatgtgaggccttagtcccgaagtctgtccgacattctctgttcgttttgctacagttctcttttcaacttgaattcagatttcaatccgcaggtctctcgtatagctctacatgtacgggatttggtctagggtccggcgcagggacagaggccgaaacagtaccaagtcgcgagtcgtatcccctaacacgaagagctgttgtgctagacaagggaaaaagggaaagagctatgctagctatacgttcctaactctcagagatatttacagcaaagtgtttttattagcttaacgaatgttccactccgagggtccagagtccactggtacctatcctgtacatactacaagcctgacaggtagtgaatatgtcagagctaagaccccgccggatttaatatttgccaggtacaaagttcaagaacaaacaaccgggtcaaatagaatttcggttactgtcgcttcataggaagaattcggaccaaatgtagttatggtttatggtttatagtttactacatcggctatgcaaggtgctatggctacaagcgacagggaaaagtagtagaaaagcaaaggaaattgtaataacaagaagcgaataatagacagaagggaaaagcaaaagacaaatgtaggtctcagaccgttcgcgttcttccttagtttctatacatgtgccaaaggaccaatccagatccaaatccaaatcctagacaagatcaaatagtcaaagcagggcaaaatcctgtgcccttgtcaaccagactagtgccagcaaagcagatcaaaagcagtccgaggctaaacgcttgataacacccgaatagcaaggtaacatcgtcgcgcacatcatttcgtatcattccaattcgtaatctcatttgcaatccacagttctcggttcatgtcacagtgccccgggcacgaaacacagactcaaccccgatagtcgagtcgtgaatccgtaaaataaaatcatttgcaatttttgttttttgttttttgtttttttgctcccattctcacatggcaagaaatgttcgagtattgtccacccgagtctgaatatgtgcctgagacatatagtaaagtggaatatagtattgcaggcgggggtgtatgtgcttaagagtgccggcggggttgcgcgaggatattgctcaaccgtttccagcgcggcgtcggggatgtcgagttcctccgagacggggatttttctggttttgttgatgtttgtgtagaggaacgggctcggttgttgatggttgcttcatggtcggcgaggacatcctcaaggcggacgtcggcgtcagacatacgtcgagagtccttgggatcaaggatctcgatgaacttggagggtgtatcacgcattgtgtagagtattcttattctttgcgctgatggaggagggagaggtatgatttcaaatttcaaagtagagggaaatccagaggaggtcacgaggacgtatagttttgtgtaggttcaagcgcgagatgaaactgcagcctagagattcgagtgtttcaagttttggagagaatggaggatgaagaacagaggatagtaaagtagagaataaaatagaaaagaagggagttttttttataaaagaatggtaacggcgtccgacagccaaaaaggaaatgtgaatgtctgtaccgaagatcagtggagtcgaagtataagatttgtggactatcagagcgtgatttctttgggatatttgggatgtttcatacttatagaagaagtacacgtacaagctagtacgtaccatccatgtaggcaacatttccaccccacaagccaagtgcatacaagatacacatacttcgatgcacaagcccgtttgggcaatgtccgtttgggctgcggggcgatgatcggcagctacttggtggcgtccgagtgacgatgaaccacgatgaaccatgatggttcgtagatatatcaagaagcatttgatgcaaggggagtcgaatttggtctagggtataagaagatcaaattctctcttctgttctccttctatagacaggaactccgagactctagccacgataaccttgtgcgctactcgtcttatcttagcttactttttgtggatgccatccatcaagcgccatgacgtcgatggcatgaaatctccatcagggtttcgatgctcaaatactgtagatgggtcgatgggagatcggctcctagtatgtatgatgtacattggtcaatagaatgcatgtgcgccatgtggtacgtcgtcttctataaaaagaaccgccacagcaattagccacttcaatctgccgcgcatccgaatctcttccaacaatttctcatataatatgaggcaaatgtgccatacaacatagggaggaaaggaacgcgtcaaaagggacaagggtgtcagaacggagtatacgtaggtggattcgccccaatggagattgctcagggctgtgcccggaatgtcaaccgggccgtcgggcggactgtgcggactattcgatacacttatctctaggaaagaacgggatgtccaacagggatggcgactatattcagtccgcgaaatacgaatgagagcagtacttggagctactattttctgtcgagaaaccgatcgccccgggccatagtgtcactccttcagtgcaccggcgcacacgtacattcgaaatgtggcgatgcctattggatttactctgtggtccccctttttctcaccggtgcctctgggtgaacagcaagatgggagtaccgggagatgttgccgccataatacaccgtcatactcgttgatagtcgagcagactcgcgcagcagaacacacacccgagtgtccaacaagcctagtagactcggtacgatctggtgtcaggcgggcgtagcagacctgtggcacacaccgagtagtctactcattcaatggaacagtgagtcccactgcgccaaatacactgctccaaagcagcgaagcacacactttccgatcaaaatggtacgtttctccgaccgaagaattgtccgcggatgtaagggaatacaaatggagaaaggaagaagagaaagagatagcttttgatctggaaaaagaacaaattaggcagtaacaactgcgtggagtcaacataacataacgcttatgtcggggtaagtgaagtgtgatagtctcattctaccaggttcccgaggtcaacagtcatcaataaaaagtccttttccgttcttgaacgccataacttcagctaaaaatgtatgtagcggatcactcccagcacccctcatgtaccgcactgcatcgcatctccattccagggtatgcgacatattatttaaattccatgtccgtcatctcgattgcgttggccgagcccatccagagaatgttgttgcatctgtgggaaagaaagagagttagccaagctcgaagcgcatgtatctagcccgacgctaaaccaatggaagcgcgcatcgcatacctaatcagaaccaagcccaatgcaccagttggctttccatcgataaactcttgtgtgtcgcgcagcaggacgttcatgtatgaatcgatgctctcgagagtgcctttgtattcggtctggccccactttaggcggatgaggacttcagtgcccacgctgtagagatatgtaggttagcaaggtgtcttaatagcaacgatgcatatgtgcgaatgtctcgaaagatatgctgcttgggctgcttggaccggggtggggcgagtcgcataccgagcctggaggaagggacgggggttaagcggttggaactgtagaatagcaagttagcaattgaactcatgggaatagcgcgcgggatcttgagcttgaaagcgggctgagcttgagggggagaatacggacactcattgtgactcgagaagagttcctggttggttgaggtggagtagtattcaggatatgatgatagcaaaagcccaatcaagatctattgcttcgttggttgatcgtgcttgtcgtgttgttaactgcgttgacatcggggtcggcgagatcgcgaaaatgtgcccaggtaagctgaacaaggcggtgatagatggccaattaccgcccgtgtctcttcaccgccctctgcataaaagtgcttgggttgacaatcgacacgatggtttttgctgcttttaggtgaatacactgcattaaatccttagagctacgagaaagcaatgaaattcatgttatggctcgttttctcatcattggtgtatctctcattttcagcatgctccgcgcccctgttcccatcacagcctccaagactaagctcccacagacaccagtaataatacaatgggaaaaaaaaagaatcggcgttcatcaaaagttcgtagatgtagacgcctataatcttcatcgccaggtagatctccgcttagcggccaacggtccaggtgatttccttgatgctgacttcttcacccttcttctcgtcgtagtcataccactcaccctccataaggtcaatgccagagaaagtagtagtggactcaatagccttagcttcccattcaccctgaattatcttcgtcagcacatgaaattacctaggtgaatctggtgaattcgggatttactcacgtcgggcttgaactcaatgaactcgaggccacggcaatcgatttcgaggatcttctgggccttttgcttttcctggacctcatagggcttaggtccgttaatgacagaggcagtgtgggttttctatgtggctgttagctgtgtgatcatggaaaagccgagaaggccagatgattcatgtcaacaaagcggagtaaaactgagagttatgagtttcgcaagaaagagggaaagaaaccatttccagctattggattggaagaaatagctcgcttaccgtgcacagtcggcacttccacacaaaattagcctcgccgcggctaccggggatctcgtgtacctcctatacatcaatccagttaataaaccattcaatcgtggcgaaatggagagcaggatgtaattaatccacgtacgaaacggttgaagctgacccagttagggtgcgtctcgtggcaggaggtacattgcactcggaaagtgtagaagtagggattttcctcagtgtcggtgggctgaagagcagtgacgctgtatcatcatatcagctttttgactctttgataacgatgtctgaaaggatctgcccgcgcgacgttcctggaattggagtgcagtgcggggagatccaggcacctgaaaaggctcaataatccagcacgtaagaaaggagcacttacccctccatctgagcttcgaccgaaagagtgagcatttttggcttgcgaagtaaatttgatcttgaggtgtgatggctgaagtcaagatcctctctgtaggtgatgcggggtggagatggaaaatacttaacgtagatcgagggcttggcatgtgaccactctgtaatgattgagcttatcaagactaaaaatatgacagaagtgttaagaggaacttggatatttgaattgtgattatattcatagaaattggaaaataaacgccaggaatgctcaagctatcgctcgcaatgagcgaaacaaaaaagcaaaaaagctatatacatctcgaaggtaagatacagacccaaaaacacgtcaacattctcacaaacggctctgttgagaatcttggccgagaggcttcgttgagaacgcattgaagaactcgttgagagcgtcaacagtgccacttccctcaaccagctgcacggtgcaagcaacgtggctgtcaggacgggtgacgacaacaccacccttctcagcatcaaagccgagcttctcgtgggctgcaaattgagcctgaggaacgcgtatatcggggatatcatcggcatagaggtggtggtggtagtcacgtaggacctgggggatggagtccatatcgatgttgttcttggagcctgcatagatcacagagagggtgaagagcttggagtgagggttatggcgctcgaagaatgacacatcggtaatatcagaccggcgatacaccgaaaggaacgagcgttctttctctaggttggctgccaggtcggcaatggccttcttagtcttgaactgattgccagcgaagatgaagatgcggaatgcaccgttagcgggcacttcctgctcaagctcgacaaagttggaatcggcaagacgggtgacagtggtcggggtgaaagcgcgacccggggtcagatgaacaccgggaatcttgaacagaggggacttggcagggtggctcacgtcccaggtgaaaatattgggccggtaggccactccgtatccactggtgaactcgcaagatgacttgaaggtcttgacgaattcgtcctcctccccaccagcacccacggtggtgtcgctggcagaaccgacctcgccggcagaaggacggcgcttggagaatagggctgcgtacttggaatcgaagttcaacaacgtctcagcgatatccttgcgttcgctctcgtaggtgctgagaatagaacggttggcaaacccactctccacggcgtggatcttccaggccatgttgagtgcgtcatggaaagcagtgttcattccctggccggccttgggcttcaggggcgttagcgatattgtgagagcaacaggggttttaacggggggtaccaacgctatgagtgtggcaagcatcgccacccataaagactcgctcgtcaagggtatacttttcagcaataccttgtccaatggggtagacagagtaccactcaacccggtcccactcaatccagtatggcttcagaatgttcttcgcagtctgctggacctcctcaacagtggcagtctttcgggggttccaatcggcgtcggtggaggaggcgatctggacatagaggcggaccatattgtcctcgcggggaatgaccatgattgagccagcgtcggagtggatggtgcattttgtctgtatactaacgcattagaaacatagaaatacgtgacattggttcttgttaggcatgcccacctcaatgtcagggaagttggtgcgcacgacaccgtccatgacaccccaaacataggcaatgggatccttgtggtggatcttgatgcccagctgctcacggacaaagctgcgggcaccctcgccactaaacaagtacttggcgcgcacattctcgataacattcgtatccaagcacttcaaattgacttcaacagggtaatcagcgttcgcaccatcgttcttgaagccaacaatagtccatggccgctcgacagttgtgccagccttcttgatttcatccaagaacacgcgctcgatcttgccctggtgaaccagggtggtgaaagggtagcgggtatcaataaagcgggggcaactaggccagctgccagtacggccgatgccagagccgtcagctttgggatcccagaaggcaacgtcgtacaccttggcaggctcgtaagccatgatcgagcgcttcaagccaaggttgcgcaggatctcggtagatcgcggctgaataccgtcagcgcgaccagtagcggtcggcactgggcggttgtcgatatgcttcaccttgtagccccatcgtgacatacagagggacaagagcagaccgacggggccggcgcccacaatgacaatatcataattctcttgttggaccatactgatggccgaaagcaaacacggggattggatggagggcagttataaattggatggcgcacggctatgggatcagcgtaaataagtacctatggcttgaaagaaaagcagagtcgctcagaggttcaccctgcacaatgactgggggagaatgaatgagggccatggctatccctatatactgtccgagaactggcgtaagtgggcaaattgggtgttcagctgaagtaacggagaacatccacggcattgagagtcggcgaaatcgtggggagcaccggctcaagggtcagggtagccaatcaagttcaccagaaacggagttatgggcgatttgtcagaatcgcagaaacaagcgccctgtggggacaggcctgggttcccacaatgtccataataccgtcgttgatcccgagctggtagccgcagagctccagtgtgactggattgctgcgatttccctctactccacccggaaacgatctcggtaagcggacggctggacacgtgaccttcccctcggcaaccatccatatctctgaacaacagctatgatggtagtttaacctggtacttacaccacagataacccgaaattatatgccatgctctagatgaaatacccatgaggtctggcacctactctaatgttgttccctcggtctctttccatgccactcctctttcaaaaaggaaacctacattcatggatggtcataacaacagcattagatggctcaagtcttattctacaataacaccaccgtcatggttgaatggtcgttatttttttagctcaaagctaccaggtttccgacagtttaatcttgaagaatatattaacgcctaaggcaacaacgacaaaaatagattaggttgggtaaaagttgtaccgttccgaactatatccatgaactacatgtgtagaggaaaaaggacatatgaggactgaatacataatatgcatttgtgagctatgtataataagtggtactagacaattcatttaccttactatcccttatagataatatgtaatcaaatcttgggagattttgtaatatccttactattactgtagtgtgacgggtggtcacaacacataaaatgcgttatgctagtcgtgagctcacacattgttggtagttctatttatttattttgtagtgggctctcataggtgtgggtgtgtatgaatcattgtgatattgcaataggcttgtccaggtagtccaggtcaagcccccctgttatggagatgtgctctcatagcatgtcgtctttttagggttgactcacactactaggatgatgtggtaaataggcgtttgattggtcgctccattaccaacctccttgattatgaatattaaattattttcttttttgtttgatcattcattgtttattcctatgtactttctttgttccaatattctttctctatgtccattctctttgtttccattatttttgagacattgccagccaccttattgaactagtcctattgttgcagaccaatatactcttttcggccgcaaagaatgacctcggttttgatactatgctttattgggaggtcatgaataaaaattaaatagctattgtgacgagacatggtgtcgccctaggactcgacaacagcgctgcataaatatcctcttcttccaataatatttcttctttccttcccatacttcttgatattttatgcttctgtttctcgggcttctgcgttcacctttctgcaattgcaactttgacttcgaacagcaccttgacagtaactgcaacaatgtctcagtatccaccgactcgtccctgggcagctcttagcgccattgaccgagatcacgagtcgggactcttctacgaagatgatgttcctcacaccgcaaagatgactgttaacatgagtcaacctgacttcgaagaccggggccccagcatggctgaaaatcttcgtgttattgcggaacgcagtgcagctcgtcggaatggaactgctatgaacaagaacgatatgtaaggtccatccttactaacttgctgaacgtgaaatctaatatgatgaacaggttttccaagccattgccacccattcctcaacaggaagcccctcagtcggccgccacagttggtcaggagggtgttgttcaaggttctggggacaacatcgacaagatgagcattcattacgtgcttgatagatccaacatgcatggacgccacgatcaatcctcatttgctcaacgtgaagcttctcaaattgctactcaagttggccagaaagcagttgccaatggttgtgtgcactcaagtgagaagatcaaactgaatttgcttcttgatggatgcaagctggaaggatatgacgatgagactccatctattcaacccagtggatctgagccgaccctcccacccctttcgtatcactcctacaatacgcaagccacctacgccaactcctcctctgcttacggttgcttggctcgggaatatgatgctctgtatgatgctcctgcatccgagacccctggttctcaagtcaatcccagcccttatcgcaacggtgacagtccaacttcgtggtacgaatcttcacccacttgctacgagttttctccgggtcctcagattgcattggttcccaacactaccccggtgcacgaaatcaaggaagaaaatcaattcgcagacctgggggccaccatcgatgagctgcttgccttgatcaacccggaaaaagaatactcacgccttgcgaatgacaatcacagcccagaaagttcatcttctgcttaccatttcactacccccagctcggtgtctacagatatctaccatgcggatcaatactctagccttgcttaccaggctccagacttcgtcattcgtgatgctgagagccctgcaagccccgacaccattcgtggagtcacacctgcatcgccagcatggtccccgccatccccttgtcccaagggatgttgctattggtcttcggatgatgaagccactgcatctcctgaacctcagttcgatcgggaatggtctgcttccgatgtgtctctgcaagagtcacctatgttgccttctcttcctcatgtcgcttcatatccatcttctgagcgtcgtgccagctacctaaaatggagagaggagagagcgcacatgattagtgccgaggaggctcttgtcccacggcaattgaacgtgatgaagaaggccactttcaccatggatgtccctatccacaacgtttcccagcaccaggcagccgtccacacgtctgattctaccgatgagggccctagccgcgcagcttccttcgtcagcaattattccgatgtcagcaacaccatcagcagcgcaactctgagtcctgtcccccgcagccctgatgtctccagttctgagggctccgtggactctcgtggaatcaagcgcaagcgatttaccaagaccctctttggtaagaaaggataccttgatgactacgaggggcggcgcgacacgagattccgcttctttaaggaggccatcgaaaggggacattcaacctttggcaatattaaaggaatggtaagtgcctcctgactcatcttttggaactatgacggggactaacaatctttttttttgacagttttgggatgagaatcgaggtttgatcagcccatcaaccaaacccagcatcgtcactgagaacactgctcccattactctgaacaccgaggtacagtcgattctgtacgccgagattgagggcatgatcacccacgccgccaacgaattcctgatgaaggagtactatgacggtcacctctctactagttctctccaaaaggtgaaaagaagatgggagaagaagcacatgcctggtgtccctgaattccgtttcgaccaaggtacccagtaccgcattatcagcgcaaaccgcgagcatctcaacttcggtcgacccagcaacggccttggccggaacaccgttctgggtaactggaagcggatatggaagaatatgagcatccgcaccttcgtgtctcccgattcggttatcaagaagaacatccacgatatcatggatctcctggagcttttgaacgccagggaaggtcaccttgaactgcttatggccctcgatgcgcatgttcgtggacagctgcagaagcacgagatgttgctgtactactgagatactctcgctcttaacttcggctttgtcgatttcaacaattcatgtctctttttcgttttcctctgctattctgtttcggctgttctgttctaggaggtcatcagtttcgcttcttgccagtttcgctttcgttttcgcttttactattttttcttctctttctatgcgttttttgccagcgatgagatcaaccaattcagtctagcgtatttcaaatccaacatcccagatgaaccttttttcttttcctagtagaccaactggaagtaagcatccctaggtaagatattgcaatgacatcacatgaaccgaaagagaattgatagctaacgaattcgacgctgtcttgaagcgtgttggctagtatggtactataaatagttggaatattgatgataacgtactgagtcaatcaaattagaccactcatcccttggcaatttgtcagacgttagagattgaactaatttccaaaggataatcttaatttaatatgtattcccaacataacaggtcaattgaagcgaaagagcaccgaaaaagtgaagttgtacacaaaacacgtggggcgacgtcatcggcttatagcacgggtgccacctgggcaggcagtcaccgctctgcttttgacaaagttcctgaaccacttcttgtaaataaccttaccttgccggtgtttcggacagaacatgttgtagctgtaacagtctggcccccaatgaccgtcgatacatcccgcgtttagcctccatccatatccgggggtggagatcgataccaactcgaacacaaggggtcagctccgtacaatcctcccgaatggcgggcccgatccacacctacggtccgagttgcctgcttgtggatgaagagccggacctcaccgaatttcaatcgcttcaatcaccaccagaaattcggtcacatttcttctacatctcatcattgccgattgacgatccactggctcccctgcctccacctacaagccatgggaccagcaatgagagagttcctcccacgccattctcggccagggataacatcgccttagaggaagcctggcgtgatctacgggaagcgagaaagactaaatccgcgaaccacagatccaggccaaatacatcgacagggacccccgggatagctgtgcccagtcatgaatcggtctcaaatgtcgaacaccgcaaggcagccagccaagaggatccctcgttggttggcagtagaggaagcactctgagcaaccctcctttcttcccggacgatctgccctcccgcagtcacaagagttccctcacttttgccacaggcagtactggaatgcgaatccatggacttggcaaggagaatcgcgtgggctccgcattgggtgatgagtttaaacacgacactcccagaggaatttccatcgatcagaaaagagtgcgatcgtcttcgatcaatgagttcaatacacccaaaacaagcagctctccattggagactgaaaatgtgggtgaaggcgacgaggtggttggaagtctacaggctgatcgttctcacgatgcaagcatgagtggctctccctttatacgggcgccggtgtctcagcctcagacgccgcttggtcgctcatttgagtcatcttcatcaagagaaggaggcgaatggcaggcggaacttcggcccagtactgctccacgaagtgccccgaaaccttcgggcctgagaacgaccgtcagcctggatcaattgacccaggactcggagagggagatgacagaggagccgaacaaacagtcaaagattccagtcggtgtctcacggcttcatctagtcgagttaccaaatctcaaggtgagtacaatttctacaatttctttactcggctctggcttacagtaacgctttttttatagatgaaacctatctactggagtcctcttcaggacatatcaagtgtggtccgagctacgtggttctacaagaataccatgttgcctgttgagactgaacttgcgaacaaattggaggcaggctacgtttacttgaagccatggagtgacacttggcaagatgaattaaatagttgcgtggaaaatggggccgatgccgagttgaaaattgttcacccgctgtggacaaaacaggatagtcagccttcaactgcacaagtgccacagagtagtgattcgcctctggatgaggcggaggatcccttgagattcgacaataatcgagctgctggtggcacgtctattcaatctgagactatcaagtcataccttacatcaagtgccatctatgtcgatgcaaaaaatgcccaagtacttcggcccagcttacttccctcagtgtcaaggggacgacgacctcttagtgcaataaggaaaggccatcagataggcatacctgtggttcgcggctttagtcgaaaatcatgggaacacctgcacccgtcaaaatccaatcctattgatgtgcgccattacatccgcaagacccagtcgaaaagtccttctgcgcaaggtgaacaaatatgctatgcatgcaagatggaagaatcgcgaccatctccaacagatttggttcttgttatccatggcatcgggcagaagttatcagagaggatggaaagcttccactttactcatgccatcaatgcatttcggcgagaggtgaacatggagctcaacaacgaacctgtttggccgcatgtgcgtcaagatcatgggggaattatggttcttcctgtgaattggcgcacgaacttgtcgttggatgaccccgatgttgagtcaggtatcgaagacccagctagcaacaacttttctcttgcagatatcacaccccagactctgcccgctattcgatccttgatcagcgatgtgatgcttgacattccttactatttgtcgcaccataaaccgaagatggtcaaggcggtgattagagaagcgaaccgtgtgtatcgcctctggtgtaaaaacaacccagggttccaagactccggccgcgtacatctcatcgctcattctctcggaagcgtgatggctgtagacattctcagctatcagccaacacatgttcctcagtttgacttctctaatacggctttacgcagcgacatttttgagttcgatactggacatctcttcctctgcggaagtccagtcggcttctttctgcttctcaataagggtatgttgaaacctacatcattccgccttgtatctaacattatcccagctagccttcttccccgaaaaggcagagacaagccaggtagcgaaggtgacgatctacttcgtggggttgccggcgaagcaggtcaatacggctgtctcgccgtagataatctctacaatatcatgcacacaacggaccgtaagtagattgcacagcctcttcgcttcttatactaaccatctctaccagcaattgcgtaccgagtcaatgcaacagtagactcaggcctttccaactctctcaaaatgggcactatccccagctccaccgccagcttctggcaatcatttggaagcgtctttcgctggaactcgaacccgtcaacattattgccctccacagctcctgcccgccccgcagcagtatccaagctgccatccaatgtcgagctcgagacccacgacttcactcgcgaagagatcgctgaaaaacgcatgcttctgctaaatgacaacggtcaaatcgattattatctctcaggtggtggtggccctttgaatatacagtacctcaacatgctgagtgcgcatagcagttactggaccttgggtgattttgtgcggttcttggttgtggagattgcgagaaagcaggggagagaaggaacgctgcttgcctttcgggctgagaagaagaagggatggaagtattcaaagggttgattcttttttgggcctttaccttcggtttgatttttattttgtgctctggggatagaatatgtaccctaggtgattgtgatattcacatagagacaagcatacatgacttcagatgtcgttccctgtaagcccacaacgtacttgtattttattaaagattgaaacttggttgttgacggtgtattgtctgatcgaaaaaaagatcgaaaagtttcgaagcaggacagaaaggcaagaaatgtgcaaagcttgaggacagacagataagaaacaacacaggcaccaggagatttaagctccgtctgggtgtaaatcatatatcgtatcaggtctctagcaaatgacccgggtgtctgagccatgaacattccccatcaacaaagcctccacgatctcacccttgataccaacgccccgcccagccctcaacaccaccaaggcattcgctttggccaaactgccgaccttcgaagaccgctgtccggcaccctccactcccgtgctcgtcgcgtacagccgtccatccgagcgcgacgccgtaaccacagcgcggtggtactccgtgcgcacgggatcacgcgggaagttatgcgttaggacgacagcaacaagcggaagaccgagctgcggcgcgagccaaggcttagagctgagtgccccggagctgtggcccaggccggtgagtttatgcagcgaagggagaacaaacaggttgagggtgacaagggcggaggctggatttccggggagcgagaagatgagttttgattgacgctcctgttgagaggatgtggcgtcgccgattggtttgaaggggacagttgcgaaggtggttggtttgcccggtttcatggaaacgcggccgaagtggatggtgccgccgagagagcgctcgattgtcggcttgaggaggtcgagctcgcccattgagacgccgccggttgtgattatcacgtcgacgctggaggaggctcggcctacgccgcggagtgagtcgcggagggcatgctcgagctcgctagcaggtgtgtcgcgagcgataccgagatcgacggtttcgaagccccatgagttcagacatgagagaagagatgggcggttagagtcgcggatttggccgcctgtaagagtccgcgggtcattgtgctccaccagctcatcgccggtgctcaaaacgcctacgcgtggtttccggaagactttgacagtcttggtgccggttgatgccagtaagccaatctctcctcccacgggagatactagatccccgcgagcgacgattttggagcctaatgcgacatcgctgccaggctcgcgcacattctcgccgggctcgatatccccggcgaggatttccactgtcgcttcttccttgccgtcaggtgtgcacgagtccaaggtggtatcctcgaccatgactacagcattcgcatttggggggagaggggcgccagttgtaattctagcgatagtccccggttgcaatggctctagattcccgccgacattggcatgggtaatggatgctaccgggaagatacccttcgtggacagttcggcggagcaagagtctggtgcaatgatagcgtagccatcgacgatactagctctataggctgggacagcctctgcggcgtagacgtcttcggcgatcaccgagccaatcaaggatgtggtcactgggacctcaacgacttctggctcaggagtgtgttcattgatccgccgaagcgcttcgtctacagacagcatagggtagggtgaggatcgataacgccggttagggcctgcactagggtcgttggactgcagtctctccgacggcgacgtatgtgcctttggggccttatgcccatgtccatggtcagaaccatggtggtggtgatgatgatgctgatgttgttgttgatgatcactaacgccggcctctgattccagtttcttcacacctccagcatggaggttccgtgaattagccccagcagactggagacaggcatgtggaagaagcttaacaacagcatcgaggttctccatggctcctttgggtgaaccgggtaaggtaataatcaaagtcttattgcggacaccagcaactggtctggccatcatagcaactatgcggaggattagctgaaataaatatagtcaaggagaagcgcaatggcagcgcccctgatgtcatgctcacatggagttactttcaaggaggcagcaatcatgccgtgtctgaagtcttggttagtttactagcgtcaatgcgctggccagggtatctaactcacactagtcccggcgcatggcgttggattagaggagagacggcctagtgatgtcatgagcataagaaaggcaagggtcagaatcagaatcacacacttcgggggtgttgtccttgatggcaaatcctgttcctccgctaaggaggatgaggttgtaccaattagggctatcggcccattcgtatatcgattgctggatctgggacacgtcgtccgggacgatcctgaatgcggggggttcccacttcccctctgcggccaagataggcctaagtgcatcgacgaccttgtcagaagcggggtctttcgaagcagtgtcggagacaatcaggattgcggctttaagtttgttctccatgatatgcgttgtgcataagtctggggaagtggatgtttggcgggggaagttctgttaaatcggggaaaacatcggactccaaagcccgacgtaagttaatgtggttgatttatagtgcaattagtgaaattgatgccactgctgcttttcgtacacgccagaggttagtctcttccaaggttgttcgtgttagatacgaattatcccgaggtccttgaaatccggtttgagtgtacggagtaaccccaatcaattcaacctgattcaacccaattagatccagttagattggacactatagaaagatataaatacagagttgccttttaataaattttgaacaacaggtcgacatgcttccttcagtaagattcaaaagcgaggctaaatatgtctagggataagtgattttatctgatatccatttctacaggtatttgttcatatccctagtgtaacaagctagaactagctcacgcatcctcaaatctgatacatgatctccggatcattgatgcaattcagcaaaaccaaaatggctctacgtggtcgaccccagacgccccaatgcggtgtatatcaaaacatgaacataaactatgaaaacgagaaaaaagaggcgaagcggatcgcctggggcatatgcttcgattcccgatatttgtttgccgccaaaattggaagctcttctctctccaaggaaggctcaatctcaggccgcctccaatatcactgccttttgggccacgagaaggccaacaatcaaaccgaaaagtcccaggactgagctgaaaatctcgatgacgagaatcttgacgaatctagaaaaaagaacaatgtaagtgacggccctaaatatcatatcaacaacaccacgagggtcacttacaggctggggtcggcggcatcggccagggcagcaccacttccattgataccaacggagataccgcaaataagattgcagacgccaactgtgattcctccccagaagaccgcatatccagtgtagtagttgctagaggtgtggattccaccttcggctaccgggctgagctttgaggaaaaaacaatggccatgatgacaccgtagatagcgacgacttcacagaaaatgatggagatcaagttcttggtgcgaatacggggtgctcggacaccaccaccaacaatcgatgagccggtaaggaagatacccctaagaaaatatgcggtcaatatcgggatagttgagcatgccaacggggagcagcttaccatgctgcgccgacaaccgagaagccgatacaagaagcaattccgatatttgcccaagcataaggagaaacttcctcaaggaaacggccgacctaatacgcgtcaggttattaaactttcgaaaaaaaatgggtgatttttgagcgtgaggttccgtacattgaatgcttctccgtctccgtggaagagcatatctagaattcagaccatttcattagctgccagatcgcacttcagatccattgaaacgtacacaatcccaccacgataagagcggtggtggagacaccggccggatagaggtaagccatggcgacctctataagcctgatgacgaatgaattaaaaggtcaggatgatcgcagacgtagagaacgcagccgataaggtagctgaagctctgggatggaagcgggtgatgggggactcggtggccggagcggattaactgctccgttcaggcggtgacttcgcgttgcgcttccccggacgtgttagaacacctgtttccccctgcttttactgttcttccaagggaagacgcctgtcttaaccttctatattctcataaggcttgtttttgtgtctttgacccagtcacaagtccctgacctcattccgcgccactttactacccctgaatttcagtcgcatcaatcactccgtgataatggcgtctacctccggggttgggtcgtattcgaaccccttgaagaagtttaagtaagaactgggacggcattgcaacggtgtggcattataattgcattgctaacggagatatctaggctggtattcctaggcgaacagagtggtaaggatctcatcactttatacttctactacatgcgctctagtcattgggaggggctgacacaagatatctaacgctattgcagtcggcaaaacatcattgatcactcgtttcatgtacgactcgttcgacaacacataccaagcaactattggcattgacttcttgtccaaggtacgccacattataccccgcacaaggattataattcaggcattcctccgagatactatctattcgcaaaaatcagggctaaccatcgtattcagactatgtaccttgaagatcggactgtccgtcttcagctttgggataccgccggccaggagcgattccgctccctgattccttcctacatccgagactcgagcgttgccgtagtggtctacgatatttcgaatgccaaatcgttccaaaacacgcgaaaatggattgatgacgtgcgcggggagcgtggaaacgatgtgattattgtgctcgtgggcaacaagaccgatttgaacgataagcgggaggtcaccaccgcacagggcgaggaagaggcaaagaagaacggattgatgtttatcgagaccagcgcaaaggtcgggcataatgtgaagcagcttttccggagaatcgcccaggctcttcctggaatggaaggcgaggccaaacaaggcgaaagcacaagtacgttcattctcgtgttttatctaccgacttctcatactgaccatgatccctcttccagtgattgacgtcaatatcaatcccaaggagacgaccagcaacgacggctgtgcctgttaagattcccccgcatccattctcccgtccttaagtgccctacctcgatgaacatcgaggctgtccatgatatcctacaattttcgaatatgtacatgtttcttctttctttgcttcctcctcctgtcaatagcgcgtgtctagatctctcagtgccgaatgcggttgtgtccagtttgttttctgatctcgtgggaggagacaaggtgttttgatttccgtttaaccagcatcatacgtttttttttggcagttgaagtttcttcgcttgacttccttttcggggtcttttgattatcgctctggtagcatgggctaacatgtctgatatgtttgatatgctttaattgatgaagctgtataatatggcatttcccttctgggtaacgcaccgcatagccggcgccaatgaaacatgaactccacactattatatatatccaatttgtccacggaatttttattcaaccgatgacgctaagaggcaagtcttgactagttatcaaagacaaaccctttaacatctgtctcacgctccaaattccacattctcttgattaaggagtcgaccttggtcgtatctgtgatcccgccatatttagcaagcgcgtgggtttttacctagaaatgtcatgtcagaatatgattatatatatcttccccttacccaagagtgagctatttcctgaggtatataaacaaacaagccgatttaaaagtacacaacgaaaaggcggtatattgtgtaacgaattatatagtcagactatagcatctcagtaggaagtcaatccatatttgtataaacagttcaaatcgcaggaggactataaccgactaatcaactacctgattaggaacatgtatgccttggtagtaaggcagaaaccgtgggttcaggcatcaatatttcataatgcataaatgcataaaatgatgagtaaagtaagggggcaagccacctatgcatggaaatgtagtcttcactacctccaaggccacatagacgtctatcaagtagaccaaatggataaatccaagatgaccgaatggtacaagccaagaatgagttcattaaatcaccgcacggtgaaaatgtaacgcatccgagcagaaatcgggcaattgatctgcgggcggatcgcccgggaaatggcgcccctgggccatctgcgttgccatacacccagccttttttcctcttcccttgctttgcccgtatatatactcaaccacatttccatcgctatttccatctcgataacgcacattcttggccagaggccctaacacacacactcatggggttcgcttcccgttttctccgcattccgcggccagaggtgagttgagatcgaatcttatcattgccccccggagctaacttatttcgtcatctcaaagtcctttttctatctgatgagcttagagactggtgcttccttgatcacactttcactgctcttgaataaaatcagtggcctatatggcctgctagctcttttgaccggctaccacctgtcccccgtacaactctcaatgtacctttggtccctcattgcccttggactcgcctcacttctgttcccccacattcgcaaacagtcgcctctgcaatgtctcgccctcacctacctttatgtattcgacagcctaattaacgctgcatacactgccgctttcggtgtgacttggttcttggtggtatcgcaacattacgatagtggcaacgccgcgggtccagggggcgagacgatcgcggaaaccgctggcttcaccagccccaagtacgatgcagcatatgttgagatccagaacacaaaggaaggaaataacttcatcgctcatcccccgcggtccgccgaagatttcagcaatgtcgtccttcaacccgagagtctccccagcatcatcttcatctgccttctgtgggtgattagagtctactttgttctggtcatgctcgctttcgcacgccaggccctccgtctctgggttgcggtcccgcgacacacccaactcccgacccacagccgcaacgtttcagtcgccagcgttgccgatatcgatcgggagcctttctccccctacagtcccgacggccagggctgggaaggtaagttgggtcgtgtaatgatcagtatcggccacagctattggctgggtgaagaggaagacggtaactggctcagcggcatcaaccacaagttccgcaaccgttcgggcaatacggagctgcccggcgcgctagaaagagaaagaagacgacgttccggaacgggtccaccaacaccgtcgccatctattgttcgatctactgtccttcaacagccaattgctgagactacacctgctggcatgaatgtgaagatgcaagattggaccgcaccccgataaatgatcttttggcggctattgaacaatattagtcgcaacaatgtacagccctcgcttcgactcggctccatgtcttcaatcccccatcttcctactggctgtgtgcattagatgcaacgaatttgaccgtacccagtcaaagggcacaatccatcttggctcttgtgtctgtcccatcatttgatgaagtcactgaatcggacaaccggccatttgatttcattcgatactccaccatcatgaagcccgagccccttttgctcgatacttacgacaaactgcatatatgaatttggaacgggtccaggtatatggcgatgatcaggccacatgtgtccctgattgatatctgggtccccctgggtctggaaggcgttttcaatctcatgatctcaaaatgagtcttccttggtggcaccactcgcggtcatcaatctgacatgcacgattttggcgtcgggacatggatatgtatattgcttatctaaaatgggggttctgcatatttccccgcgagggtctcatgtgttattttgtacacaattgcttttgcacacctcacacataataataatttcttctggatgacgattcaacagggtgtagtcagtaatactgcaatattcgagtctgtacaattcggaaggctatgaatccttctaatactaaatgagtcttgtagattcagcttttttcctgatagacgtctacaagatatgttgtagacgcactcggccgaattattacaatgaggctgattggctagagccatgataatactcgaccgagatcggtgcagacatttaaccttcggcatttgaccggtagtcttgttctagtagggatttccttcaggtctttggaccatcgagccctagaatagactgaaaggacaggaatatccccaataaaaatgcatttattgggcataggtaattgccgtggtgctattggtacgctaaaagcatgaagaaagatacttaatcgatgctctgggagccaatagcctgataactcgggattagtggacttcacatcatgccataggtcaagcagatcccttgagaatcccggtatctaagtaaattccatgaaatgtcgatgtggttctcgtagatgccaggcaccgcacaagaacctccggccaaatcccggcgctgacgtgctcgacggcatcacgggatcccccgcactgggcccaaataggaaagtttgcatttctgccactgggtgtttgcactgatgtcgtgatcgaagaccaatcagcagattgctgatctaacccccgacgacggagaaattgaacgagcgagggaaagaaaaccactggctcttttttttttttccttgtctagcaagagaattccaagagagctgagagacataatatttaattgtctcctctcatttgttaccatcctcttcggttctgtgctgcgagtgggagatcgctgcatacatactgataaggtatatcgcgattttatcatcccacttgtgctgtgatctcaacagccaatagtcgcaaatatggtgtctatctcaagcgctgctgaagcgggtatgtattttcctattatttctcatccttgaaaaagggagggcaatggctgatcctcatgcaattgtatagtggcaagaatcgcctacctcactagcgataccgttctatccgtgcagccctcattgcagaatgactcattgttctccaaggccctcaaggttctcaaggctaataagacgaccaatctcacgtcaaaagtcaccgaggtgagttgaaaacgtcggggttgccagactggaacccaactaatcctatttccaggttcaagctgtgcgctataatgaagatcccctcctgtctgccttcaccccccttcagaatggcgagactacctccgtcgtcactagctcctcggtcctgattaccgccgtccctcacctttaccgtctcgccaacagccccgtggtcattcacgttgctctggagccctctccgttccccgattactccgtaatcagctccatccgccagtccggtttcacattcctccactcagagaccgtgcaagaggctcaggacatcgctattacagcccacgcgctcgcccacaagtctgggaagggtgttatccacttctttgacccctccaactcggccaaggacccctctattcccgaggaggacgttgaggttgtgaagaaggttctcagcgttggtggaaactctgccatctctgctggaacccagactctttacgccgagtctggtcgtgtggccactgtcactgaagagaccgtaggtacttcacccgctggtctacccgaaccagcgaacttgaccgtgccctctcaacctcaaacccccttcaacgctagcgttgacaactcatcggttggctcctcacggagagacagcagtgctggcagtgaagccccgagctcgaccgcgacgactgtagacagcgccatcgctcggcctgttaacgcggccgatatcttcgagtggacagctcagatttggaacactctattcgaagaggtgggccgcagatacaatgccattgagtacaccggcgctgccgatgccaagtctgctatcttcgtctttggctccaccggagtcttcgtggatgctctcgccagtgccggtgccaacccggagttggagaacattggcctgatcactgcccgcctgtaccgcccctgggttggtggacagatttccaactctatccctagctccattgagaagatcgctgttctcgagcaggttcgcaagaccacccgatggggtccttctttcatggatctattgtccagcctgacaccctctggcgctcgcgctcaggcccctaaaattgtcgggtaccgtctcgggcatattgagccctccactgctgttcaggcccttcgcggtgtcttgcagaacctaaactccgattctcctatccagaatcttgacatcggaagctctcaggttcctgctattcaacctgctctcgagcagcctcgcattgagaatgcttacttgaagatcttgagtcagctctttggagagcgtctccacattgccaaccagcttggatccaacaatgccggtgtttcaagcactattgccgcgagccccgagtttggatttggttcactgctagctcgccaggaccgtcgccaacgcttcatccgggaggttgaggaagccaccaagtccaccgcttttgctactgacgttcccaagacttggttgtctcgctgggctctgaatgtgaaggaagccgccaaggccaacaagcttgctcctgatgtgattagtcgcctctccaacgatggctctgcgatttcccgccaactcctccagtctaagagtctcttctacgaagagtctgactggctgatcggctccgatgcctgggcttacgatttgggtaactccggtgttcatcacgttctcgcatctggcgcgaacgtgaacatgctcatcatcgactctcaacccttctctgagcgcgctgcgtctgacgccactcgccgtaagaaggatattggtctctatgccatgaacagaggtaacgcttacgtcgcctcggtcgctgtttacagctcgtacacccaggttcttcaggccatgtccgaggcccagcagttcaagggtccctcagttgttgttgcctacctgccttacaaccaggagaatgactcggcactcacagtgctgcaggagaccaagaaagccatcgatcttggctactggcccctgtatcgctggaaccccgacaacgaggagaagggtgagccaaagttctcccttgactccgagcgcatcaagcgtgatcttgagcagttcctccgccgggacaaccagcttacccagctcatgaaccgccaacctaagtatgctcctgtgctctctgagtcctatggcaccgaggttcgtgctatgcagaagagaaacgccaaggactcatacgagaagctcttggatggtctgttcggtgctcctctcaccattctctttgcatctgacggtggcaatgctcagaacattgctaaacgtcttggcaaccgtggtcgcgctagaggcttgaagaccatggtcttcgctatggatgagttccctgtcgaggacttgcctaccgaggagaacgttgttttcatcaccagtactgcaggccagggtgaattccctgtgaacggtcgtagtctctgggagcatgttaagaacaccggtgatctcgacctgtccaccatcaactattccgttttcggtcttggtgacacccactactggccgcgcaaggaggacaagatctactacaacaagcctgccaaggaccttgatgatcgcgtcgccttcctaggtggtcgcaagctcactgacattggcctcggtgatgaccaggacccggatgcctaccagaccgggtactccgaatgggagccccgcctgtggaagtctctgggtgtcgataaggtggaaggtcttcccgaggagcctgctccgatcaccaacgaggatattaaggtcggctctaacttccttcgcggcaccatcgctgaggctcttcttgatgagagcactggctccatccccgctagtgaccagcagctgactaagttccacggtacatacatgcaagatgaccgtgatctccgtgatgaacgcaaggctcaaggtcttgagcctgcgtacagcttcatgattcgctgccgtctccctggtggtgttgccacccccaagcagtggcttcagatggatgccatcagtagctcacacggtaacgagaccatgaagctcactaccagacagaccttccagttccacggtgtgatcaagcgcaaccttcgtggcgccatgcgtgccatcaacaactccatgatggacacactcgctgcctgcggtgatgtgaaccgtaacgttatgtgcagttctctccctgagctgtctgacttccaccgcgagacctgggcaatttctgccaagatcagtcagcacctgctcccctcaacctccgcctaccacgagatttggctgaaggatgacaatgacaagaaggttcaggttgctggagatgcgatggttgaccacgaacccctctacggtcctacctaccttccccgcaagttcaagatcactattgccattcctcctcacaacgacactgatgtctacgcccacgacattgggttgattgccatcaagggcgccgatggccacctcgagggcttcaaccttctggctggtggtggtatgggaaccacccacaacaacaccaagacctacccccagaccggtcgcatgttcggatacattcccgccgacaagatccaccttgcctgcgagaagatcatgctcgtgcagcgtgacaacggtgaccgcaagaaccgcaagcacgcccgtatgaagtacaccatcgacgatatgggtgttgacgttttccgaagcgaggtcgaggcgcttctgcccgacgggctcaagttcggcgagccccgccccttcgagttcaagtcaaacgtcgataccttcggctggattaaggacgatactggtctcaaccatttcacgtgtttcattgagaacggtcgtatcgaggatactgctgatttcaagatgcgtactggtctccgtgaacttgctgcgatgggcaagggcgagttccgtcttaccggtaaccagcatctaattatctctcgcatcaccgacgaagacctccccgccgtcaaggagcacatggccaagtacaagcttgacaacactgctttcactggcttgcgtctgtcttcctctgcttgtgttgccttccctacctgcggtctggccatggcagagtctgaacgctatctccccgttctgatcaccaagctcgagtccaccctggaggagtgcggtcttgctcgtgacagcatcgtcatgcgtatgactggttgccccaacggttgtgctcgtccctggctcgccgaggttgcctttgtcggaaaggccttcggtgcatacaacatgtacctgggcggtggctaccacggccagcgcttgaacaagcgctaccgctcttccatcaaggaggatgagatccttgacattatgaagggcctcctcaaacgatactctcttgagcgcgacaccgacggcgagacccccgagcgtttcggtgattggtgtatccgcgccggtatcatcaaggccaccaccgacggacagaacttccacgatggcgtaagtgattccttctatgatatccaccctattgattctaataatctcctacaggttgccgaagatgaggaagaagaagaagagtaactgctgaacacagccgttacacatctaatctccggttttttatgactctcatgggatctaaaatttgctttcttccccttctaattggatattttcacgtctgtatctcacgtcgcaatgcattgatgtcttggcgattgtatgattccatgcaaaaatgttagatttcgtctttttttctcttttattccctttcatgtgcatttcaatgacagctcaagtctgcccgtacatatatactcaaatgatatcatttctctagcacctcttgctatccctctaggccttgaaaaggtggtagaaacccaaccgtggaaacaggccagggggcgttggtaaccacgggaagctgatgcacagctgacatcacctgggcaccccagtgcgtctttgacttcaaaagtttcaatgttgatttcaattgatcatcccttctatcattctttctatcattctttctatcgttacttctatcgttacttctatcgttcctcttattactttcgttaacgaccattccagttgcaatatgcagatcaatatgaaatcgtttttatcagtgatgttcgcgccactgctctatctacgccctcgcttccgtcaagaccaggactggtcatatcgacaagcactagcaaacactttcattaaagtctttctatacatcttcgtggcatttcgcacaaaaccaccactttccctcaagccaggtctagacggagaccgcttcgtcgtaatagagccaggtgcaccagagctctacactaccattgcagtggacaacgagatccagccagtcaccgtgggaggcacatggttcccatcactctaccaatacaacacaacgactacccaagataagtacgtcgtgctccagtttcacggcggctcttacatcctcggcgacggccgcacatcatcttgccagttcctcgccaacagggtgctagagcgcacaccggtaagtcacgtcttcagcctgcagtaccgtctagcctgcaaccccaacggtcgtttcccagcccaactccaagacgccatctccgcctattcatatctactccacaccctgcacatcccggcatctcgcatagttctcagtggcgacagcgcaggcggccacctcgccctcgcactcctgcgttacatcagccactttgacgacgagaaggccctcccaccaccaacatgcacgtggcttttctcgccctggtgcgatattcccgctgcccgcaacgaggatctctggaataatcttcccaatgtgcaaacggactatatcccaccgtcgttccctaaatggggtgcaaagcattttattggtaacctagagatcacgagcgaggtcgagccgtatcttgcgccgctctggcatcccttcatcctgccttcccctgttttgattgtgtccggtggcagggaggttatgtgtcaggaacatgatcggttagcgaggcatttgggtaaaattcagcagaatgaaggtcgagtggagtatttcgtgcaggataatttgccgcacgatgtgcttatggttgcatggattctgaactttcgaaaggaggctgatcagtgtgctgccaaagctgggactttcttgacgagaatgcagtctatgtcagaggaggatgctactcacgttccttctgtggcttttgagtgacgatggtgttcctatgtatgccatggtataccatattgctacctatgtattgctatttgagctaaattatccgattgaatctacctagtagaacgactgcggttcagataaactctctatagattctcctgggttcattgtaaggctctttagtagccttctattatctcagctctatttctcttcgcctattgtcatttgtttggtggaaagaaccaggaaacaccaccttccctaaagtttgacttgtttttcaaagtgcagtggtttgtttgtcaggcgccaggcagtccccagctccttcagatattcacctccccgcattgtcttttcctctctccttctctttcctctcaagattgtgtatccatcgcatcttgcaaccgaggatcttattcttgatactatcgtattcaacccaacgctaatcagcgttgatctcatacaagttcgttgggatatcgattatcgatttccattgcctttttcgacgcgttaacgcgttgaaaacactaggacagacctagataccccgcaaacgcgcacagctttgtcgtcaccgggcagtggtatacccaccgtgtcagctgaaaatggcacccatcccaggaatgactggagagcccgcgcgctttgagaaccagtacgacatagaatggacaggccacggcccgtccactaaaataattacaactgacacgtacactagctacagcaagctcgagaattcccacgggctccagggttggcccctcttgcccgtcttcactgccagcattcttattgcgcttattgttgtgggtatcgtcgcccacgtttgcttctggggaagagacaggtatgtgaagagtagcctattttggattgcggatcgctgatttgagctggtcatgcagccacccgcaagctgcatcttccgaggataagatgaagatggagaacaccaaggaaacccgctccggtatgttgagacattatatctcttgctatgtgctacgctcacgatgtatagatggctggatgtgtttcattctggcctgccatgctgtcattaccctcggtgtggtctaaagaggaacatatacagctgctggagaattgggctgtcagatgaataccccctgttctctggctagctaacaattctccgtggaactgcatttgtcttgtggaactcgaagataagactcctagtctggtgcttgtcgtctcaacgtgatgtaatgatctattcatgagactggatcgaagataagttcgattctttacgaataatatttctttacctaaggaataacaatccactcagcacaaactgagtggagaaaagcatgtactccgtacagtctaaattattatcgacagcagaacatgttagccctatagcatgttaacatgtcaacgggtgtcggtcagctactgcgcaaaatggaaaagaccataacaagtggaaagaaacatgaccgagggatcctgagctatttcccggtaaggtgcaagccctgcacgaacgtcacatactgcagtttctcacgagattgtttggcggcgaggacccagcgagagatgacaacacgctgcgatctgaatacgtactaacatgatggctgttgagatcgatcaagcgacaattagaaaaccgctaggattgaggatatttataaagctacgagaccttgggtgatggatctatgtctcaccaaactagatctaaacaagcctacgtgggtcgaatatttagccaaacaactctattattgacgtgcaaatcctaaagagatctgagagtagtccacggtccagctaattgtatttagatcctgctcaaacccagccatctccgtcagttgacatcgcaccaattcatccaacccgagcatcctgaaccgcgccatgatgtaaggcacatcggatcgcgtgggccacatcattctcacatgggtgagattgcaaccgacatcgaatgatgccggtgcctgcttcttaggtatagaggcgcgaagcccttgcctggttggttggtcattgcgaccgctttcaagtgactgactgggtcacggtgggacgaatacaccaccccgcttctggtggccttgacgtcccttactcattgcgactaccccatccgggggcatttctttgtcgacttccgtatggttggttgccctatactagggaaccgctctcaagtgactgactaggtcacggtgagacgaatacaccaccccgcttcgggcggccttgacgtcccttactcattgcgactaccccatccgggggcatttctttgtcgacttccgtatggttcgttaccttagttaaaaggaacggtgcgtatcttggcacaagcgtgtcagatgccctcaagtcatggtagcgggctgatgtaagtatggacgaacagattgataacaatagacggaaaataggaatatttgagcaggggtgcgtctctcacgctaggaaggcatcaaagaagaattggcgtgttcgatgatgacggaggctagaagagcctcgacgtcaggagagtgcttcatgatgagaggggggatagcatggtggctctctcagcacaactcggtggtacccaagaagaaaaaaagagtaaacaaggggggaaaaacgggatcttgattcaaaccagtacacaagagcggtgagtacataatcctgaaccgataactagctgtattttctgccacatccccgctgaggaatttcgataaaaaaagttatcagtccaagtcgttcattttgcaattgttactggttccctcgttctttcgcgtccattgttcatctaagatatttagtaaccatatcgccatgacttttcctgatgacgatcctgtcgtcgcttcctacgacgtcctcctcaccgactccgatgtttctcgctatgtcttccaatacgttgatcgggaacacgaccgtccctacaatgaccaagaaaatcaacgaccgatccaacttcgacttaagccgcgcactggtcttattgaagttgaagtccccattagtacccgagaaaactacgacgtcaacaagggaatgcgctatggggatgcggtaaagaagagccgttccgcgcgcgacgggggtgcttacggtatggcaggcggctttactgctggtagcgggaccgcagctgcaggagggagagtcaagatggaagcgaatggggatgtggagatattggataataagagggccgtggattctgcatcattgctgcgagtgcagtcacttggaggtcggataaagccttctgaagaaggcgatccagtctacatgctggccaccttcacagatagtacgtttgtcctacctatcactttcttctccggtggcaacatttgattctaacgtctgttcatagaaaacttgcatctctcccccgtcacatcggttgttcaattccaccctcaacttcaccacctggatgctttagatgagatgccaaaagggaaaggctcacgtgctaaaaaggatgacgatgaccgtcctaccgagagcgaagcacgtgcaattgatattaaggtcaaggccgctgaagatagtgaaggagctgcaaacgccggcaacctagacctccttaagcaaatgcaagatgaaaaatggaaaacatacggctgggttgacgccgaggtaagttctctctttgatggacctttctcattcttgtttcatactaactcttaccgatcccaggccgaggattcttggtacacatatgaacgctatatgattcacaaggacaccgaacatctcccatccctagaatcaaacatcgagtcggaagactacctcgataaaatgagtgcccctaggattgatcctacccgccccgacatgactggttgggctatgaaggaaaatcgccggaggcaaagagaaagccgcgcaggtaatgaggccgaatagcgaagagttatattgtacaataatccaatcaaccaatttctagcggaagcttattatcatcctcgcaattatctaaggcttcatgttgcttcaagaaagaacatgggaagccctatactagtagccttgccactcatacttgtccgccaataacgataagacaatgggtatggtcacgtgcctgtttagtttttctgccatctccgtttcatcgcgacaggtccgataaatctccctttctcctgttgccctcgtgttttttacaccttttttcctttctctctttttctcggcttggtcgaggattgtaggacagcgtgccgacgcggtcattctccgtcttctatagcggaacaatcgcactgaacatccatcattgcggtgtcctgtttttctggctgtcatcgttggaaagtctgcatttatcttataatctacgcttaatatctttttctttttgagtcattatattcttattcgctttcaacctccaaccttcgacttccaatcctccaaaaggccaatttcatgcatcatgttatcccgcgtggcttgccaaaaaaatgcctttcttcacttgcggagggctcaagccttccgagcatcgttccatctgccaacaacacgttttcattcatactcgagtaatcggaactcacttttaaatctgtcgtgcaattcgattcacgatcgcccgcgcaatccgtctccgcaatcagaacgttatcttgctacagccgccgagcattctagcatcgatgggcattcacacgagacttacgaccacttcatgcacatgcccttcgagaacttcgatacatcatccctgatcatcctcgactcgacgccacaatcggaatccaaagttttccgcaggaggcatggtgtcggcggtgatgaaatagagatgaaggccaatctagagctctcattgaagattggggagtttgagcgagcctctaagttgattacccgccttggtcattatcatccgcctggctcggatgagtatctcgctatccataaccgtttcatgagacatatggtggcgtatatgatcctcaaccggcagcaggacatggttttgccgttgcaaaaatggtttgaagttgatatgcccgccggtggcgtgacaccggatgcaatcagtttcgcgattatgattcgaatggcgctgcgtatgcttcatggatcgaagcgcgacagaactgttcgtcgatactgggaacttgctcaaaacgcgggtctggaggaagagcttgtcggcattgaggtgcttgaagactctgatgttggtgagctgtctaaggtgagcttacacttctagtctgtactctgatgtcctgctgatgttctccatctagatttgttcctccgacatgctggacttggtttcgaaatatatggatctctccgaagccactgaagtgccttcccctatcgtcgataataccccccaggtgcaagctgccgaccaaaggggactgggactggcatctctcaaacagtccctgtctctcttctccggcaattctgatgtacgtttgccggaaggtttctcaggcaccgaagaggaaggaaaggaattgctttcaaatttgaggcaaacccgactcgaatccgacagtctcgattcggccctctggcgttggcgtacagataatgccgagagacaaaaatccggattcaatgtcgcttccgatgagaaaaagcttaacagaatcatgagcgaatggcacgcggaccttgtgacaagaattaaacaggagttggcgcttgttaaagagacacttgcgaaccgtatcgtaagtatcgagcaaaaagagcgctgtgaatacggtgtgtttttgcaagccctcgatcccgaccggttagctgcactcactcttttgtctgtgatgtctactttcagtcgtcaggggatggataagggagtcaaactttctgcgctcgcttcagtagttggaaaagagttgcaagatgaactcattgccgacacctatctgaagaagagtaagtctatggatccgtgtcgtctaaaggcactgaagcagaccctcgcaaaccgcaaagacaagcaaggccgactgcgatggcgttcgctcgttcaaaaaatcaacgcagaagatgaatctataatctggggctctcgctcacaggtcaaaatcggtgctgttttgatgagcatgttagtcgaagttgcgaaagcccctatttggaccgaggatcctgtcacaaaaaaaagaattctcaatatggcaccagccttcgaccattcctatgagattaacttcgggagacgatccggtcatatccacatgaatactaaactagtggaaattgttgccaaggagccgcccgctgagctgttggctcgccacctccccatggtttgtaagcctaaaccatggacagggccaagaactggcgggtataagatatacgagtccaacctagtgcgcactactcccggtgaactactgcaaccagcgtacctcaaagctgtcttgaaagatgaagggctgaaagagatccgagcaggccttgatgttctcggtggcactgggtggaagatcaatcaacaagtctttgacgtgatgctcgaggcttggaatggcggcgaagctgtggggaagctagctcccctgaatccagacctgcaaacgccagagaaaccaagcccagacgccaactatgaaacccaaagagaatggcaccaaaaggttcgtgaaatcgagaaccttcgctcaggatttcattcggttcggtgtttccaaaacttccagcttgaggtagcgcgagccttccggaaagaggtcttccatctgccccataacatggatttccgcgggagagcttacccactccctccttacctgaatcagatgggggctgataattcaagggggttacttcttttcgctaagggcaaggcgcttggggcatctggcatgcgctggttgaaaattcagattgcaaatttgtttggatttgataaagcgagcatgtcagaacgggagcaattcacaatggacaatctggatgatgttcttgactctgccaacacaggacttcatggacgacggtggtggcttaaggccgaagatccatggcagcttttggcagcgtgttgcgaactccgcaacgccttgcagctttctgagcccacgacatatatctcccatcttccaatccaccaagacggctcttgtaatggacttcaacattatgccgccctgggtggtgatagtgtcggtgcccagcaggtcaatcttgaaccatctgaccgtccttcggacgtctataccggtgtgtgcgaatttgtcaaggaagctattgcacaggacgcagccaacggcgatcacttggctcagcttctcgaaggcagagtgaccagaaagattgtgaagcagacggtcatgactaatgtctacggcgtgacctttttgggagcaacgagacaggttaaaaggcagcttattgactatctccctgatctcagcaacacggagaggaacagcgcgtctttctacatcgcaacaaaaatctttggcgctctcggatccatgttcaacggagcccatgagatccagtattggcttggcgattgtgcccaacgcattacacaatctgtgacaccggagcaaattgaggagctcacgcaagcagcattggtacccatgaatgaacgcgacgagcatttttcgacgtccattgatccagaaaaatctttccggtcaactgtgatttggacgactccactgggtctcccagtggtccagccatatcgcactcgcaagacgcggcgtgttcagactagtttacaagacatcagtctcgttgaccccggcgctgatgatgttgttacaaagcgcaagcagcttcaggccttcccgccgaacttcatccactctctcgatgccacacacatgatcatgtccgccaatgcatgccatgaagcgggcctaactttttccgctgttcatgattcattctggactcatgctgccgatatcgaccagatgaaccttatccttcgagatgccttcgttcgcatgcattccgatgatgttgtcggccgtctcggcgctgagtttagagtgcgatatggcaagaatatgttcctggccagaatcccccgcttcagtgccttgggccgggcgatctttacacaccgctcccgccataagattactaaacttcaagagttgatcaacgaaaaccgacgacaaaatctactcagctcggaagatccagaggatcaggccgagggtcgtgctatggtgacaccctatagtgtctttgaaaacttagggggtaccgactctgacctgactaccttcaaaacgatgggtacgaactcaatcgggtacattccagacgtccttccggatctggaacgtatgccgatagcatgttcaatcgacaccaacgatccggccatcgagagcctggtcggcgacctcgagatgtttgagacgaagcaggcctcacgtgacgagatgtcccaagtagaggatgatgtccatggtgaaccctccgatcagaccgaggaggacggtcaaactgagcagacccagccttctgcgcggcgacgtcagtctcgccacttgaccacgtggttatggatgcctctcaaatttcgtcccgttcctaagaagggcgactgggacctgacccgaattcgtgaaagtgaatacttcttctcatagttttctcatcaccctgggaattaccgcatttccgctggcgtttatgcatacttccacattttgttttagccatttctagagtgctgtggaggagtgacttcgggattcatttagctgacttgtaatttcctgcatcgtttctgcccgattaccttctgggcttcattggttgcatctgtacattacacatgggaagaaaatagtatatactacctgtatgaatatgatattgaacttgaagaactactctaccgttgtctcatcagaaccctatatattacctagtgacccctcaactttaaagcaaataccggagtacatactctcaaagtgaatttaggcaaaattcaaaagaaaagcctaaaaccaacagagagtggccaagcaccgcggatctagccgttttggagcgtcttcagctccctatagcaagtgtacagtgtatactttgccgagctttcgaaagcaaacggtcaagttcgcgtctaaatcatgtactctgcactctatgccgtagaatcccggaacttgtaaatgatccagtctgcacaagaattatatccggagcccgtactttgtacaaatatgcattgttctcccccggtgctaagaccggggttatgtgaccgtagccagatgaggggttcaggtccgaagtattatgcacgtagtctacattttcacgtatctaatatctctagggctacaatacgataaacgttgcttgttgtgccgtatataaccaggatgttggtgtgaaatgtggggaatacggatacatatacagagtacggagtacatacacagaaagcgagcaaagagactttgtagtttcatttgagacaaggcgccttgggagctaaaccggatgaaagctctggatacaagtgtatctgtgtttagatggatatgagagagatatatatacttcctaaaccagtgacaccacgtgctattgccccccgcctttgcatgccaatttccccagattttcggattttctaatcttctgaacctctggacttctggacttctggaattcatatttctggtcttccttttttttgggcggtctacttctaattgtccgacttttttttatctcttagatttgaccttctaaactgtgcgaaagccacgctttgggctgcgccgagggggaaaagaactcccgaggtcgcacgttctctccccgtctttctgcaatgccgttgtgacttctcggtcattctctatactgcatttgactcaatcctttggttctggtagaccagagagtctaggttcccttgatctgtccctctatgtcgccatagccctgcttttgcctcctcggagaagcatgcgatgacctccctctcctccgccaattcttactctcccttttcgtcccaagcaggacggatgacacaatcccaaacccccggactggatacgcttgcggaggggtcgcagtatgcgctggaacagctccagttaacacgtgaagccgataccgctgacatcccaaccgatcccggtcactctcgagactcgaagacttcgcgacattcccagcatcttctctatagcgaacgaaatgtttccaattcaggtctcaaggatccagaattgcgcgattcccttgccgaagctcgctctgctattcgcaaaaactcatccgcgaccccagcccgtcgaagaatcagtcgagcctgcgatcagtgcaaccaattgcgaaccaagtgcgatggacataatccctgtgcgcattgtgttggtacgacttttccttcctaccggactctctccatttgcgcattggttgaactaacggttcccagagtttggacttggctgtgagtacgcccgcgagcgcaagaagcgcgggaaagcgtccaaaaaggatatagccgccactgggatcaacgacagtgatatgggtagtaaccaaaacataacgcataccaaagggcaggcctcaaaaggacagtctttgcacgaatccaacgaacattatgaccgcgcctttgatgccgcgcggactctaagtggaggcgcaaattctcggtcgcataacgcggatgtagctggattgtctgccatgcgccaaaatcaagcgctcgtccaagcacctcctcagcagcagatgagttccaacatagcgggcatgccattcaataattatgcagcgctccaagaatctcaccgaccttcgatgtctgtgtcagatatgcgctctatgcagatgatgcaaaactcgaatgggaaccctcggtcgccaggtacagtgcttcattctcaaggattcggttcggtgtataatgatagcacataccctttgatgaatacgcaagatgcgaatccgagctccatgaatcatttccgcattgggaactcgacggacaacccatcggcttctttcattggattctctcctccagcgcagtcacctagctggttgccactcccttctccatcacccgcaaacttcccttccttcagcatgcctcctttctctagctcattgcgatacccagtcttgcaaccagttcttccgcacattatgtctataatccctcaatctctcgcctgtgatcttctcgacatatatttcaccagctcatcgtcctcacatctttctccatcgtcgccctacgtggttggccatgtcttccgcaagcaatcgttcctacaccccacaaagccgcgagcgtgcacccctgggcttctcgccagcatgctgtgggtctcagcacaaacaagtgaggctgcatttctgacatcacctccctcagctcgaggccgagtgtgccaaaagcttctggagttgacgattggcctactccggccacttatccatggtccagccaccggagaagcatctcccaattatccagctaatatggtaattaatggagtggctctcggtggctttggggtatctatggatcaattgggtgctcagagtagtgccactggcgcggtggatgacgtcgctacatatgttcacttagcgactgttgtctctgctagcgaatataaggctgcaagtatgcgatggtggacagctgcctggtctcttgcacgagaattgaaactcggccgcgaattaccgcctaatgcggcgacccgtcaggacggcgaaatggagggcgagggggacattgatgtgaatggcaacaagaggcaaccatcctctctgttaagccacggctcaggtaactctgcgatcaatctcacagaggaagaacgtgaggagcgtcggcggatctggtggttattatttgcgacagatcgccatcttgcactttgttacaacagacccttgacactgctggataaagagtgcgagggattgttacagccgatgaacggtgatatctggcaagcgggtgacttttcatctgtcaactaccgccgtgctggcccaccctccgaatgcactggccatagcatgtttggatattttttacccctgatgtctatcctgggtgagattgtggatctgcaacatgctcgcaataacccgcgcttcggtctacatttccgcaacagcggtgagtgcgaaagtcaggccatggaaatccgcaggcagctcgatgtttacgcccagagcctgaaagaattcgaggctcgatataccagctctattgccctcggcaccggtgaggccgacacagccatggaggcctccaacatcaaccatgtcagcccatctggtcggtctattagcaccgtaggatcgcatgtgagtgagtccatcgttcatacgaagatggtggttgcctatggcacccacattatgcatgtactccacattctgctggctgggaagtgggaccctatcaacctgctcgacgataacgatctctggatttcttctgagtcctttatcaccgccatgggccatgcagtcagctctgctgaggcggccgcggaaattttggaatacgaccccgatctaagcttcatgcccttcttctttggcatatatcttttgcaaggtagcttcttgctacttttgactgccgataaattgcaaggagatgccagtcccagtgttgttcgggcctgtgaaacaatcgtccgagcgcatgaggcttgcgtcgtgactttgaacactgaatatcaagtaaggtttacccgtgacatagccttagatttacagaagctaatatcctacagcgaacgttccgaaaagtgatgcgatctgcgctagcacaagtccgtggccgtgtcccagaggacttcggcgagcagcagtcccgcagacgcgaggtgctagccctttaccgctggagcggcgatggcagtggtctcgcactttagcaagactgctgaatatctgctgagattctttcggctaccactcgtcttgattttggatctatttccgttttctttgtcaataattttgattttaatttgcgccctgtatactatatttcctggattttggacataccccgaggagcgaaaaggcgcacagtattctgatgtctatatattgactcggcatatactatacctagttgaatattgattttttgtttgattttgggaatctccttcgaagagaacgtattcattttcttttctatactcccaaggggcccatctccttggtaaggcgtctcatttttgccgttcttctgttcgagagtggaatttatgtcatgtgatgaagcttatttcggactccacccaagctacgatcctcctctgctacacctgttcaatctcaaccaccatctatcccaacaaatgaacgtacttgagatcacaaggccaaaaaaatgaaaccctatataggcatacctcttgtgattggacttgtctatcgagcttggtcgcgaaaatctcttaccccgctcggcctggtcgttgcgggatgttcagcctccgctcacgctctccacccatggtcggcaccagtcgcgctccttgcggtattctattttagtgggactaaggttacaaaggtaggaagcgacctgcttctcaatttacataaattatgggcgcagcttacaagatcgtgatgataggtaaaacatgagatcaagtcgcatttgacactctctgcaaccggtgcggaaggtggcgaaggcccccggaaccatatccaagtcctagcgaactctgttgttgctaccatattatcgatcgctcatgcggccatcctggctaaaacagcaggcactgaatcgtgcttctcactcggccagaatgcggctgatatattaattgttgggattgtagcgtacgtcactcaacttcactttctatgcatgcattatctgttctagagcatataactaaccggttcctttttgcagaaactacgccgctgtagccgccgatacattctcctccgagctcggcattctctcgaaatccaaaccccgcctaatcacgtcgttgaatctccgtgaagtccctcccggtacaaatggtggtgttaccgcaactggccttggagctggccttctgggttcgttcattgtttcagcgacatctgctgcggttctcccgttctgtgccagtgccggattgaaggatcgggctctgtggaccatagctatgactctctggggtacgctaggcagcgttcttgacagtgttctcggtggacttttgcaggccagtgttgtcgataaaaggagtgggaaggttgtagagggaagtggtggcaggaaggtgagttcacgattatgtgtccttgaccactctgtgcaaacatctaatctattttctaggttatcattcacccttcgacgggcaagccggttgttactgctgatagcactgccaaaactaccggtagcatacataatgctgcagtgcatggcacccaggtgacacacgtcctcgatgaaagtcatgaaagtcgtcgccttgaaactggtcatgactggctagacaacaatggcgtcaaccttctcatggctgcgactatgagtgtcggggctatgggtattgcacagtggttctgggggttggatgtgtttgagttgctcgtgtaaagtataacagacaatccaggtctcgaacatgcttattacgttcctgtttatgtttcgggttggttaagatcaaaattatgatgaatatatgtctttctctctttgtcttctgaatgtctctgctttgacaagcgtgggccagctttttgtttgtgctagctgcttccaacccaccaccttcccacctttccatttcgatgaactcagccggtatttgttttctttcccttccacttctcttttcctctttctgtgttcccttcgcgtctcaataacaacaccggccttatcaagaaaagccaacgtcaccttgcctcaaccgacacagctcatcacgtgttactgctggccctagttcatgggacccttccatgcatgtaccgagggttcataagctctatctcggatttggaaaactgaaaaccaacaaccttagcgcaaacagagcacgccagccaagatgtctactgaagaagaacgaggagtgcacgtccgagtcacaaagccaattgtctctttcctacccgagaccgaaacatccaagaccatagcatatgaccttcagcacagtgacttgcttcctgtgtatgactacgtctcctgggaatatttgatggccggcgtcgccgttgagaactcgtactgcacacgtcttcttcttcgtttccctgcagatcctgccagattctccggtctcgtcgtcgcggaaccatctcacctatggggtggaacaaccatctggcgtctcattaatcggtggctgatgcgcaatggtgagttatcattcgttatagtttggtgtgttgcccgagctaatactcgaaaggacacgcttggctggaaattgattcgcaagctcccgcggcacttgaccagatcaaaaacgttgatcccgaacgctacaaagacatgcactttatcccttgtcagaccttgaacgagttttccagcagcattccctccttcgataacgcagaagagctgtgggataattacaggatcttcaaggaaagatggtgggccgcaactaggcagtctccggagattcttgttgctgcatctcatgctttgagatctggacagctgggtatcaaggccgagcgcgtcatactaactggtctttcccagactgcagacttgatcagaaagttcatcctcgagtctcttcatctccgacttcctgatggatgtgccccatttgaggggtttatgccatgccaatgtgatgccggcaacccgctcccagacttgcacgatgcaaagatcattgaggttcttggtgagttcgagctaatttacatcaaggcactctacggcggaaagaaagagccttcccatcgtcgtgctgatagcaagtcattccgactctacgaagttgctggtatgtcgcatcgcgagacccgatatctctccatggccgataagaagcgtttgttggctgtggatctggaaggtgcccagtggagcactttcgcgaattctttcatttatcacgcactctttgatgctatggacaaatggattacgaccgatgttgctcccccacgaggtacaacaattgatatggacgaatccggggagattgagcgagaccagtacggaaatgcgcttgctggagtcagaactgttcatacagatgtgtctactgccaaaatcattgatgttacccctcagccacatcctcattggcacactggtaagtttctcacgtccgcgagaatctctttcaattgttctaacttggttataattgacaggcaccgaggtccctttcaaagatgtcaagttgtgggctgtttacaaaacggtagccaactatcggcgtcaggcgggcgaagccatcgagcgacagatcaaagctgggtttctgctgccggaagacgctgaagtcctgcgtcgcgatacgattgagcaagtttccttctaaacttgtcagactacagtacttgtttctcatcatggttctggagtgttatttggatcttggggcctgaagcttcttaggaacacagttgtgcaagccttatgtattatcggggtgcccttgattatgttggatggatttgagaattgtgcgcttctgcaatttcaatgtcttcagctaggccttgaatatctaccttcatgtcaatgtgcttcagttttgctatttaaatagtgataccgttcttcgttggtggagatgatttgcaaacccacatgaagatcccacgagacgcaaagccttgaatcggtttaatttgatctacaacgggctatatgcgagtggtatagagacggtagcaaaccccccttatttgggtcaggaatgggatttatatgagaaaatgtatgagcctaagcgcctaaactccgatttagaatgcacttcaagttctaggtgctgaacagtaatgatttcgctgatccctctgggtagtacaagtttcagcaatatgacatattcactaatacatatgcaatggctgtattccactagcccttggtctacattagcaaaaaagaacatccgataaagataattgaaacaaaatcctctgcagaattacaaaagcccaaccatagtgcccaaccatagtgtagatgttgagtggaacagtctgcagcacgcacctcgtggttagcaaagatgatatctaatctatttcactagaaggcataattacccgacagaaagcgtccactaagcctgtccatgtccaatcccttgctccatcacccccggtgttttgacatatgccggggcaggttgctggaccggggtgtatggcacccattgctgtacagggggtggttggaaggatttctccagttctctttctttcttcttgcgatcacggcgcatcttgatgagaaggataataacaacaacaatgacaatgatgataacgattgggatgagaatcgctttgagcaagagttttagaagacccataatgtaagattgcagtatgcgagtaggtggcagagcctggtataatatgatgtagaaaagatacaacttggatgggtgaatcgaggagacttttataccccgacctgctcacgccctgactctgtgtgactaggccacgtcgtatcaacgagggcatgggcgcaatctacatgagcataaggaatagcgcagcgctaaatggtgatatatggttggcggccagcctatgaatgtgctgaatttgatatggaagcacaagcagactttgttaggctgcatcagacgttgcaactgtgattgatcgtgcatgattgatgtttcagtatattttccaggtcatgccgttatgtctataaatggatttgttcgaactgtgtgactttgaacagcgtaagcaatagttcttgtatacagacaatacagacaataaaccaataattcgagcaaggaaaacaggagattaagcggaactctgctgcctggtccttttctctcggccgatcatccggccacaaattgattacattgctatggatatctacgtgatgctcgactttggtctgctgtttagagatagaaccctttagactaaggacttaataggcagaccttataaccttctccgtcagaatagatagcaagccaagttgattgaattgatcaaaacgattcaattgaaattagtccgttcatctagttacagcgccaagtctcagccctacgaggcgactccactatcgacggcgattcttgcctgtcctgtcactctaaatatagaactgcttctacatattgtacggtttttgagcggcagaaacctagacttatattttgtccgaatgtaatgtatgcaactaggaatcattaattcgtgaccctgcattctagacgaagggggcatcgactgcgtctgggtgcacgtagaatgcaattgcgattatcaaatacctaaatcattagcatcgagggtagccagaacactcatgggggcactcacgttccaactaatagagacccttcgtagtaattggatcgacctccgcgaatcaagcagtccatgacgatcaccgatagaaagaataccacagtttcgaagggactgtagcgcaaagacatgggctgcccaataaccaggccacatatgaccaggaacggactcacaaacaatgcaatctgcaatgtgcttcccacaataacaccaattgcgagatccatattccccttgatcgaagaattgacgacagtattgaattcacccgcgttaccgacaatgggaaccacgatcaggccaataaaagcccggctcacatgccacttgtctacgaagccatcgacgctgtccaccagacgatcggagcagacggtaaccccgagagttgcaaggatcaaaattatgcttgccgaccaggggcccagaactcgctcttcttcctcttctttttgatcgtcgacgaatagctcagcgtgactcttcaattgaaagtagagatagaccaggtagaatgtgagtaggaccacggaggcggcacgggagagactcaggacgctgacttccacttcgtgggacttggacggtatggttgaatagagcacggagggaatgatcaatgttgcagatgaaaccaccatcaaggatgatagtatcccactaacatccacgttgaacctcaccacatcttttgcatagccgccgcagaaaaatgaaacacctaggatctaaatttcgtgtaagcagacaagatcaccgggtagtgaatatgcaccaagacccagacctaccagtagatttcctgacaggatacttcccaccatactggactgcacgatgctgatttctccctgtcggaccgcagtgattcccacctgtgtagcgatcaacgtcagtttcccaccttaacagagaacaaaacgtcgaaacaatccaaccacttacaatcatttcaactgcatttccaaatgtcgcattgatcaaccctccaacggtttgcccgacgctttttgccagttcctctgtggcaaatgacagcaacgcagcgagaggaagaatcgccaggaagttgaacacgaaagaaatcgaatcaccccatccttggccccccgcaatgattcccagaaacacgaatggaagtagcaaattggtgtagctgcatcccagggtagctttaagcacacggaacagagagttgcctaggaaaagagcgcacttcgagacggggtggtttgtgtcacgcaactctgcagattcctccccgtggctttcgcattcagtctcgtctctaagtaatgcatcttgctcatgggctgtcgcgttggcttcaagcggtccggccatgatttcagggtcaatcttggttgactttcgcagtctagggtgagctgtgttgttcatattggcaggagtgaggaaaaagaccaagaaacatcgtggagaataaaagggatggtgtattgctccactgtctctcagccatagacatctgcgtacgggttagtgtaaccttacagataaaaatacatgtatgtttcagttaattacgtttatattacgtatttggctgtatcggtatggaaatattaatgtgatacactgagcctcatttgttgacctgtgtgggctttctcaagacgggtaaattctctcagcttcatcttttccctcgatgaatcatgtctcccaatcgagcttcacctatgctatacttcaattttatcatggcacaggtccagcaccacctgcgcctcttgtcacttttgatacctctcatcggtatcatagcaggagccctcaattggaacagtgttgctatcttcaccctcaacatcgtcgctgtgattccgcttggattatgggttaaccgatcagtcgattcgttgactgtaggtggcagccgagttgtcaatgaactgctgaaatcaacactgggaaattcggtggaattgatggtgatatctagccctgggggattcaagcttcaattcaaacatatgctaacgacgattgatccagatcggaattaatgcgatcgcgcaaaaaaaatcacacatctcccaatctgtgatacttggaagtgtcctgagcaatttactgctggtaataaatcccagtatcaaacccaacaactggtgccatgaacctccccctaatacaatctatatctacaggtcctcggtggcaccattttcgtctcaggatacgaccaaaaacgactccgatttgatcgtaccctcacaacaatcctctcatccctcatgatggtcgtcttcatcctcctcgccctcccaaccataatggaggtcttcccatctgccaaagccacccctgcagaccacatactcttaacgcaacgcatagcggccattatactcgtcatcctgctcctcacattcctcattttccgcctcggcacccatgcggccatgttcgctagcaccccattcagccagcgagctcaagcccacggcggccggtctcagataatcgaggcccagattccacagccgtatattggcaaggcttcagcatctatgattctagcagctgcatccgcgtccgcgcttgcgtgcacatattacatagtaggttgtttgggtggggttgcttcaatcacgggtatgaatcagtctttccttgccgtgacagttgttccactggtcggaaactcggttaagtaccgccgcattgtgatggggtcccggacttacaatcagatcgagcttggaatcagggcggttgttaacaatgtgttgcgggttacgatgcttattgctccgctactggttctcgttggttggggttttgaccagccgcttattctgagatttgatgggtttgaggctacaatgcttttgcttagtgttgtggtgatgacctatcttatttctgatgggcggagcaattacttcgaggggttgatgttgattggaacgtgagtcgctcgcactactttgatggactttgattcgtcggtattaactttactttctcttgatagatacatgattatcacgttctcgttctttgttaggcctgaggtgccggcgaatgtgatttacctaggtggttagcctggtatatcacacatgagtcgttacttgaagtggctgctggatgcggcaaatcccttgagccatctagtgtgcatagaacgccacaaccaaacttgaatagctataatcatacatcaataaaagtacttttaaaaatcagtaaggagtctagagaaacttacagagcaatcagcatcgcaccatggatgtaagcgtactgtccatcacgaagtagatgattaaccaccagaatggccaaaaacatggtcacggtctggaatgagtcgaagaaaagtgtcatcggttcagcaatgcaccagccgataaccaccaagaatggtatgacaaatagaccaatctgcaagagactgtcgatgataacgcggattgcagaatctgtatctcctgtgcgagatgccgcaatgacagtaaccccctcggtgctattgctagcgattggaataaagacaattgctatgaaaacttcagagactccaagcgtctgcgccatgttgtcaacactttcaagcaggagttctgtgcaaaagactgttgcggccacggctgttgtcaatcggataattgatgaagctaagctggctttgttggctgcggatgatgaaactccgttattttcatcgtcactagcttcgatctcgttcgaaaggaagagatgtttgtgagtaccgaggtagaagtaaaggtaacctccgtagagcgcgaggagtaccaatgatgttcctcgtgagaagtatagtactctgtcatcgatctcagatactgggaaagtcgaatacagagccgttggaagaagcatcgtgacggctgtgatcatcatcaaagaagacaaagtctttgcaagagcgctgttaaactccaaaacctccttgttgtacgaagctgtgacgaggcagcaaccgaatacctagattgagctgtcagtccggatgatatggccaacactgggactttcataatgtgaggacttacaagcaaaatatccgagagaatactgccaaccatcacagactgtgcaaatgggatctcgtcatgaatcagagctagaattcccgcctgggctgagtgagcattttgtcatttcgatattcagggcaatattgttactcaccgtgagctctactgtatttccgagtgtggcactgagtagtgcaccttgcagctctccaagatgcgcagtgagttcatctgatgaggtggatatcgcctcggacaagaagataatggcgaggatattcaccgtgaggactatgatcgggttccagtgaaatatctttgcaagcccagccagaggtagcagcaccattgctggccgtccatgattgatgctcagttccttcagtccattttgcgatggcatcttgaagaacctctggatgtgaatccaagggtcctggcgatggtggctaggcgctggctgagtgtctcggcgagataccatggtaaatcttggatctcttggattgttgaagcttaagtgagatgcgacccgcggactgggaaatcacatgaactggatatttccaagattgtgttccgaacgttaccacggtacaagtacgggtactagtaactttcagccttatcaaagttacagccctattactagcgccaaacggaacggtctccaccaggaagtgggcgatagggctgagccggtatttagccgctggatacttttcaatagctctgtatacaacttacagtatccaggcaacagcatttatttgatcttcgtctcagccttatgggatgttctgacgtgttaggctataaatactcgaaagatcatgtgcaatgacgtttaattacagggaaggggaacacaagtcttcgttgacccctctctgctgtgtattgtaattaatcggaacattcggggccccccacaccttggcaatgcgttcgcagctcacaattcttatcttcctctcaaagagtcgtcacgctcaacccatctagtgacaacccaacctccgacccgagtaaatgattaagagccagcctaccggatcattcacaccaaaacaacaaaacaacaaccggggccaggctggataatccttgctgtccgtgatctatggataatcatcctccctccctcgagtcgctccagagggaggttagtgaactcacagccatatatcatggccgaggctggacgaccgaagcaacagaactagagtcagcaatgaccacagcggggaaccggatactcgcgacacgtgcggattctgaagggatgaaaataatgctcgaagagctagccgcatgtgtcaagacattgctgcaggccaattcatggattgttgccgaagatctaggcattctggtgctggactcatgcgagaaacttaagggagagcaagacttaatgactatgacagcgatgcataatcttgcttcggcgtattggggccgaggccagctggatcaggctgctgctctcgcttcccgggtgaccaagttgagacagaagattcttggagaggagcatccccagacgttgacttccatgaccaatctagcttccacctatcggagccaaggcctctgggccgatgctcaagaacttgatttgagagtttttgagatgaagaagaagactatcggtctcaaacattcatccactttaggctcaatgtctaacctggcaatatcgtatgcctatctcggtcggtatgaagaggccgagacaattgcacgccaattggtcgatctcggagaaagtgaattatctccaaccgatgcctcgttgttaaaatggaaacttaccctggcatcgacctaccgagaccaggggaggttagactccgctgaaaagcttgaattggagattgtcgctgttagtcgggacatatttgggacgaatgatcactttaccttgacctctatggccaaccttgcatccacataccgcgaacaaggtcgatggtcggatgctgagcgcctggaaaaagaagtcgtggctagcagcgagaccgtgctcggcgaaacgcacccgcagaccctgatgtccattagcaaccttgcctcaacataccgcaatcagggtcggcttgaagaagccaaagacctcggggagaaagcaacgacagtaatgaaagaggtcctcggggaacgtcatccacacacactggttgctatggcggatcttgcagtgacattccaaatgatgaggcaatcaccagatgccgagatcctggcagcccggtcattacgtttgatgaaagagacgataggcaaagaccacccgtatacactcaacgcgatggccaatctgggcttcatataccagtcgcaaagcaagtgggacgtcgccggtggaatggccgaaactgtatattctcgcagggaaagagcattgggaacggaccacccagataccgtggcagcgctagaggatttgaggagaatagcgtgggtagaggcggcggatcagaattcacagcgtacgttgaattagactctcttttaggcttggactgtggagaggtgtcgactgtccccagcgccattagtctgtatctagctagtgtcagccaggtttggcgatttttaatcattttttctgggctcagtgaccaattgtcaagtcttgttgtctgccagtcagccagcctcgggcatttacatagcctccttgccaagacttgagactgtcaacaatcttcttgtgtgatctctggggctttgttttgggggagtacaataagcaacacagccctgtaagaaattcacttgcctgctctggggtggactttggttaattgtatggctaacgagttcagagcgcttgtccaacataggcatgactagttgagtcagaagaactaaaaaggaagacttcatattgatgacctataacgcacaaaataacatcaaaggaaggtaacgtgtcttccagatgtcgctgtaccggctccgatacatatctcttgcagaaataggtggatatcatgttatgatactgatatcttgtctcttggtatgcatgatacgccaactgtattttacaatccctttttacgtatttgtatttcgccagacaggtgcacctcctttctgattttgtccatctgatcctcccatgacattatccttgacatgacgccaatttcgggagccaggaggccttatatgtctcttttttggtcgcgaatagtaagttcaacgatgagcctgagaatgtgtcttactgacgatacccagaacccgcgatcaaaacgtgccacgaaacaattcactcaatcgttctcgacctttcccctggatcctgacacattaggcaatcttgtgttgtccaaagatgtccaagagttccatgctattggtggcgtaacaggcttggaggaaggactacgaaccgacgtccactccggtctgagcctggacgagacctacctaggtgctcccgcgaacatcgctgcgagtactataagcactgcgccgacagaaaagaccgctatctctgagcttcctatgtcgataaatcttcatcgcgacgcattcgtcgacagaaggaaattcttcggcgacaatcgcctacccataaaaccatccccgagctttctgtcattgatgtgggcagcctacaacgatcacgtcctattcctcctaaccggggctgctattatctcgcttgctttggggctgtatcagacattcggaaccaagcatactcccgacaacccgcccgttgaatgggtggagggggttgccatccttgtcgctatcgtcgtcattactctcgccggtgccgcgaacgactatcaaaaagagtgcaagtttcggaagctcaatagaaaacagcaagatcgcaatgtttgggttcttcgatctgcaaggattcatgaggttcccatctccgatgttgttgttggtgatattgttcacatcagtcctggggatatcgtacctgctgatggagtattaatacgaggtcatcaggtcaaatgcgatgagtcctcggcaactggcgagtctgatccggtcgataagacccccatagatacccgtcctggtggctctcgtgagatcgaccccttcatcctctctcataccaagatcgtggaaggcgttggtgcgtacctcgtcttggctacaggcacaaaatcaagctacggaagaatccttctctctctcgataccgacccaggcttcaccccgcttcaagtgcggctcagcaatcttgcaaagaatattgcccactttggtgcacttgcggcgcttgtgctgttcgtaatcttgttcatcaagttctgtgtcggccttcggaatagcaccgagtctgcctcggaaaaaggacaatctttcttgaatgtcttcattctggccttgaccgtcgttgtgatcgcagtccccgaaggacttcccttggcagttacactcgccttgtcatttgccactactcgaatgatgagagatcacaacttggttcgacaactccgagcatgcgaaacgatgggacaagccacggatatctgttcagataaaacgggaacgttaacacagaatcaaatgactgttgtctcgggtttcttcggtgttacctcgcaatttactgatcgagttagcagtccagacattttagatgaagaaagtaccttgtctgtggcaaaatgcatgaaccatctctcgagtcaatcgagatcgcttttgaggcaatctatcgcgattaactcgactgcaattgaaagccgatatggcggaggtcggcagtttcttggttcccaaacagaggccgccttattgagattctcccaggactatcttgagctaggtcagcttgaatttgatcgcgcgagtgaggaggttgtggatgttttaccttttgatgcttctcgcaaatacatgatcacagttgtgaaaatggccaacggggtatatcgatcatatgtgaaaggtgctcccgagattctcattgagaaatgtgtggccacgattgcacagccaatgcaagggcttagtactgctccaatcacggagtatggtattgaacaaatacgccagacaattgctcagtatgcgtcacgatctttgcgcacgattgcgatttgtttccgtgatgtagaggagttaccttccagagacgaggaagaaactgtcagcttcgaggatctgatgaaagagttcacatttctaggaattctgggtctacgagaccctctccgagccgatgcttggagtgctgtcgacaccagtcataaagcaggtctcactgtacgcatggttaccggtgacaaccttctaacagcaagggccatcgcagaagaatgtggaatcatcaatagtcctgatgatcttgtgatggaaggcgataagttccgtgcgctagatgaatcacagcagaaggagctagttccacggctcaaggttcttgctcggtctcgtccagacgataagcgggttctagtccaacgcctgaaggatctcgggagagtcgttgctgtcactggagacggtaccaatgatgcccctgcccttgcagttgctgatatcggattctcgatgggaatatctggcactgaaattgctcgtgaggcttcttctattgtcctgatggatgatacattttcttcgattgtcaaggctatcatgtggggaagagcagtcagcgatgcggtcaaaaaatttttgcaggtaagctactctatcaacaaggagtatggatggccatcggtctaatatccattttccagttccaaattaccattaccttcacctctgtgggcctggcatttgtctcggcagtagccaactcatcgcaggagtcggttttgacgccagtgcagctcatgtgggtaaacctttttcaagacactctagcagctctagccctggcaaccgatcctcctcctcgccggatccttgaccgcaaacccgaaccaacatctacgccgttaattactcctaccatgtggaagatgattattggccaatctgtgtatcagatggtagtaacactcgttctatactttgcgggctcttctatcttctcttatcacggtgcttttcaaacatcacaattacagactgctgttttcaacacctatgtctggatgcagatattcaacatgtacaagtatgtcgatgctaccttcaatatttttgcgttactaaccccaatacagcaatcgacaaattgagcgatcatttaatctcatcgaagggatccatcataactggctctttatagcaatcacctgcatcatgatgggcgctcagatcctaattatgtttgttggcgggcgggcattctcaattacaaagttgactggcgatcaatgggcatattctatcattctcggcgcaatatctattccagtcggattccttctgcaggttattcctaccgtgattgttgaaaaaccaatgacaggcatgaggatgctatgggacggcttgcggcgtcggtgatttccctttctctctttctttcttgatcattcacgcgagcgtctttgaatcttgcatggccatccagacggaatagccgtaaactgactcttgaatacccattcgtttctaggatccacttgctcaatatcgtagtcccttattagagttgccattagtttgagtagctcaaattgggcaagattgcggccggggcattggttgtacccagctccccactaatagatattttagttcatttcgtaaatgggtgttggcgttatcaattgcctacgtggattaaaaacgagtcgatataagttgtctctgcttgaagccagcgatctgggttgaagctgttgcagtcctcgccgaagatctgggggttgcgatgaaagacccacgtgttgatactgagaaccacctatagatagagtcagtattcaatcaaatatcaatcagtgtaggtaaagtaaagcctatgaagttatccttactccttggggaaaatatctgccagcaatagtcatcccaccttgtggcacgactcggggaagtccaccaacggcagcagagtggaaacggtacgtctctttcagctattcagagatataagcggagataattgaagtcgactgcttgcaagtggctacttacacaggcctgaagaaatggcaacctctgcgcttcattatactgcacgataggcgagagttcaccccgactctgggcagcatcaatctcatcgcgtaagcgctgcaaatattctggatgacggagtaggtaataaataaacgcctgggctgtggcaccaacagtatcggccccggccccgatattcgcaacagccgcggcaaagatctcattctcagccatgcgatcgggatatttggcccgaacgtccagccagcgctgcatcatatcattccttgttgcggggttattcttgcgcgcatcgatagcagcaagacaagtgtcgaagatatgcgatgaaggctggagtccaatgcggctcagaagcgggtttcccagtgtcaggttgtgtagccagatatagtggcccatgaccgcgatgtagactgccagggctttggtgtttgcgaccgcatctctgatatctgtgcctgtttctacgaatccaaaggattttgagaaggttacttcgcccagcacgtcaaaagcgaagaagctgaaccatttgtcaaattctactacctcgttgcatttgcttaatctgtcgaggtgcttttcgaagcagtggaggattgcgtccacgtgtggctcggacttgataatgtttgatagtgcaaagccggcggctatgttgcgcgacttttcaatatgccgctttggattcaattcagacatctggttcacgtaatggtagtctggaagactgaaaattgagtaccacgagcccttttgtgcatggttgttaatattgagtacttttgcttttgcgattgtcaagagaaatacatactttggctatatttgcatggagaagctgctttactgcgtctgggtgagagacactgacttcattctctgcaatgcgaacaaaataccctgtcgctcttgttaaaatatgaaatagaatcatgacagaccagcctaccattcttttggtgaaggtcaataagctcatcttcgatatggcccttccacaaatgataaacctgccatagtgtcgaaaaagaagccaaaaatgggcctggtatatctctgatcggggtccaatatttgcgagtgatcgctcgcacagtaaacaaaatgactgctaaaacccacagcttggacaaggtgatcaaggccgttaccccagacacaagtaaagaaaccatttcaattgacagtatctgatatacacgttccacacgtaggggatgaagttttatttccggggagattgttgggaatcattttaattaaacgtgcttttgacatgggtcggtcataacaaaagtccgttgctcatagcttcccctgagaacacaatccagtattctctgccgtctagtatcaacctaagctggaatagtgaaagtagaatgttttggcgttggccgtgcctagtccttgtggggccggccttgctagcggcgttgaggtggactcggaggaaggctgctagcacatatcggggatagtcctactatctcacgatggtctgatttgctgattaaatattgtgccgcgggggtcgcgggccggagatgagagtagaatccctccttgtttggcgagaatccttagacaagttggttgcagggtagttgaattgggggccaaagtctgccttgatgaatctattcacctcggtttcgtgttttaggaatgggatcaattcttcaaatattctcttgggcacgatgtcctcttctaaatacccatcgtcctttctggcggagaatcgccgccagccggcgattatcggcatggtcgttgtgacaacactctcattacttgtcgttctgattcgcctgtacgctcgggggcatctaatccatgagctgggatgggatgacctcacgattgcagtcgcacaggtaaatttgatccgatcactcgcgacctgttgcgggattttgatgtctatctagttagtcagctggatagtcctggggctttcattaatggtcatccactatggctctggccagcatctcgcagcgttgatgaacgacccagaagccctagtgcatatgtataagtggcttgtcggagctcagctcgtgtatatgttcaacatgtggctgtgccgcatctctggcatcgctttttatgctcgtctcaatcaaatgccacgattcaccctttatctgcgtatttccttcgcttttgtgacggctgtgtatgtagcgcagacactcatcattactttgcagtgtgttcctctcgctgttctgtggggcggcgcagagggtgaatgcatgggctcagagattgttttcatttcgacttctgtactcactatcgtctgtgactcgcttgtgctgctattgccaatgaatattgtcttctcgttgaaggcaaagctagcaagaaagctagtcttagcacttgtactttgcgtgggagttttgtaagttctcttgtccttgtcttcgtcaacagtgagaaagggaagtagctaatatctgtctctttagtgctgttgtgtaagtcttcgccgccttcccagtcacggtctattagctcaccgattataggacgtctattctccggatggtgtccatgatcgtcgccctccaacacccggatgatgcaacttggtatttctctgtggtgatggtgtggtctgccacagaaatcagtgccgctatcatcgctctttctctcccggcgttgcgggcatttttcggggtcttgagcagaaatcgttcgacgatgcatcacagtgactcagataatatagggacaataggccttgagtcgattcctctatcggcaagggagcctgtatctgacggacatgatgttcatgagacgacaatcgatgtggactgggggacgagtccgagtcaggagacgctttggggtgtcaaggatggagaatatggttcgcatgggcgttgagaggccccaccccggtagacgagcatagtggagtacctttgctccgtgtttactccatacctagttaatggtcaatccaaagaaaaattgtttccatgtggctgaattcatttgaagcgatgtcttggcattgtttccgcccattctttgatgatctggtgctgttgggtctgcccacttcttctgttgaggccaagaagttttgtatgggtcacttgcgaatgctttctgaacacatggctgtgttcctctcggtgaggcagcgtggcgaaaggcattgctgaggtcggccagctgatgtatccatttggagaactagattgaggcacaccacatcatacgagcgtcagagagcaactgccaagagaactatccctgcctagacagaaatgaggtagcttagacctgaaaagcttcctcggggatagattaatgcaattgattcgttctttcggcaaacctgatggtcatgcgagttaggctcaattgaccatatcggagaattgaacagatacgaacgcctttaaagagtggagcctatcattcgagaaatccctgcatgaccgtggagttatcgtatattactaatatcagacttccaaggtttagttctgtagttcgtggcagtgattacatgatgtacattgcacgtggggcaaatcgacctgttgcacatgagtttggctgtcttggctggcaaaaactctgaaaccaaccgcactaggagctcttccaacactttccaatcctccagggttcctctttcgtcaattagagtcacatcctacaaagtacgaaggcacgtgcgctcgcctcggagctcccgatgtagggcaaggcggtggtcgtcagctcggcacccgatgtcttctagaacaaacatgaaccatgcgacagacacattccgggggattggacctcttatacacccacgtgtgggattgcagtgctctcataggtagatgcggaccgtgcgcccccacccccgccaagagccgcaaccgtccaatggccgtgtcctggaaccaatcaggggccgtctccaccgagttctaaaccaatctacacctaatctggctccttttcgtcgcatgtcaatgtaaaactacttccgccgagatattgccaagacattgtccaatttgcttcagaccataagcttgcggaaaacgggctttcttcttcttggcttggtcgcgttgcatttactttttgccaaggccacagacgatgattgctaggctcccattgcagcacgtgtggccggagtgtcccaatcgggaagttctcctgggcagaggacgttcgccacaaagccttgtcttgcatagagagtagagcggttgtgtcttatcttcccatgcatacataaagggcagccttttcgcccaggtcttggtttctcttgtttctcagatcaaaagtccgtccagtactaagctttgaatcgaaagcttgacttgatacaactcatcaagatgtatctccatcaatacgattacatctttgccatcggcacgttgtttgctatgcttgatgcattcaacaacggtgcaagtaagtagcagcctatccttggatggttgacctcgaactaaccattggatgtctatagacgatgttgccaattcttgggccacgagtgtctcctcccggtccatctcctaccgccaggctatggtcctcggtaccatcttcgagtttgtcggagctgtcgctgtcggtgcccgtaccgctgatactatcaagaacggcatcatccccaactcggccttcaagggcaatgccggtgttcaaatgctcgccttcacatgtgcccttgccgctgcatcctcatgggtgatgtggtgtaccaagcactccgcccacgtctcctccacctactccctcatctctgctgtcgccggtgtcggtgttgcaactgttggcgcttcccaggtccagtggggctggaacgatggcaagggtctcggtgccatcttcgctggtctcggcatggctcctgtcatttccggttgctttggcgctattatcttcatgctgatcaagtacgtcgtgcatgtgcggagaaaccctatcccctgggccgtgtggagtgctcctttcttcttcctggttgctgccaccatttgcacgctctccattgtttacaagggctctcccagcctgggtctgagcaagaagcccgcctggtacgttgccgccgtcactatgggcactggtggtggtgtctgccttttgtctgctttcttctttgttcctttcattcactcccgcgtgatcaagaaggaccctagtgtgaagtggtggatggtcatccagggccctctgctcttcacccgtcccgtccctaacggtgctgaagttgccaaggttcccaactacgccgtggtgcaagaggaacccgaggagcacgagtctcacctgcctatcgatgagaaggatcccaagaccggtgtttcctccatcccaggctccacggaggagcgatccattgaaaagctcgaggccaatcagctcacctaccgcgaagtcatggcccaatccgaagagcgtcacaaggccaagctcctccagagccgtggtcctattggctgggctatgcgccttctccgcgacaaccccatgggcgctggtgagatttacgaactccgcaacctgaagtgcatggccaagcgcatccccgccatcatcactgtcggtcttctctatggtttctactacgacatccacactgcccagagtggtaacgagggtactccggagggtgagcgtatgaagcgtgtctatgccaacgccgagaaataccccaatgaggtcgaacacaccttctccttcatccagatcatcactgcttgcactgcttccttcgctcacggcgccaacgatatcggtaactctgtcggcccctgggctgccatctactctgcctggtccagcggtactcctgccgcgtccaagtcccccgtgcctgtctggcagcttgctgttctagccatttgcatttccatcggtctttgcacttatggatataacatcatgaaaggtaagcacctcttccttccacattccaatcttcatttttactaactttaaacttagtcatgggtaacaagatcacctaccactccccgtcccgtggctcctccatggagatgggcgctgccatcacggtgctggtcttctcgcagtactccctgcccgtttccacttctatgtgcatcactggcgctaccgtcggtgttggactatgcaacggaacttacaaggccgtcaactggcagcgtgtcttccttttgttgttcgcatggatcatgaccatccccatcgctggtacccttggcggatgcttgatgggattggtcctcaacgctccccatttccttgtttagacaattggctttttggtccaatcgtgaatattttcgagaacgcacatattttacttaattcttcttttgaaataccactttttagagcactcggacaagaagatttaccagaagagtcaaactatttttggaatagaaaagctttcaattgaaataaatgataatgacttctacctaacctcttcacttttcaccattaggataaaaatagaaatgagagcgagtggcttgcctctgagttttaattgaaaaaagacaaaaaatagtttccctgggaatcgaacccagaacctttccggaacatatgctagtcgcatttgttaacggaaaatcataaccgctagaccaggaaactgctcggccacttgggccaattgatgaatggacaggccattattggcctcatgagtctacaactttgttcccaattatttaggtccggagtaacagaacgaacttgtttcgccaaccttccaacattcgaaagtgggcaatactcaatccacagcggcgagactctcaatggttcttaatacaatggaagttacatccatctttggttttatgactgactcttcatttgatttatctcatctccgacaacttagggtttccaagggatattcttttgttagtttgatgttaattgtacgaattcttcaatatttcattaagaataactaatttattcaacaccatgatacctaaatcgaacgagaaaagaagaaaaaaacttgaacaacacagatacatatcttctcaaacgcagttgcatatcctggctccgtgatatgcgattctcaaacaatccccatctcttcagcgaccttggccaactcatgtctttctctgcacaagtactcgtaagtgacaatcttattgcgagcatcctcttcgatggatttccattcctcgggagaaatggtaatttcgccatgttgctttggaaaaatggtcattgggcggcagcgttttgctaggccgaccttgaaaaacccgagccggaactgggtctgctttgtcggttcgtgaggaactccaaatacaaatggttctttcggacgcttgtagggttctccgttgactactgacgtaaggcccatctggaaacattcttgtctgaaccggtcccgagccgatcccggcttgggcatttcgtacgcagctcgatcactgggaaccttggttgggactgcgggagctgtgcccgggatcgggagctctgatggctgggtttcagctggggcgtccggagagtctgctgcgtgttcatctgtgttgtcacccgtggtgtcatctgtgaagtctctagagcctctgccaagatcgtcgtcggattcatcctcggtgtcggtatcggtgtcatctccagaattggtgtcggtgtcatccgaagaatcgccccaagactcgtacccaagctcttctgcaaggaccattccgaggacctgatcttgggaagatttctcgttatccaacacttgctgcagaagctccttgtccaccttccagtgaatcggcatcttacaccagggcttcctgattttgccaagtggacgttgcctaaccaaaggtagctgtagtttgacgagagcccccttccaagttctcaacggtcgtttgcgtttgtcttcggtcgagacagagctgttcgcagtcttgtcgaatttcgcgtgtgccgctatagccttatcatgagcacgttgtctctcagcccgggtctgctcatcaattccatgcctggtgacatccaggaagaagctcaggtcctggcattcgacgccctccttcgggtccatggcacaagggttcgctttcacgaagtgctcatgagccttgcgcatgtttccgcgcagaaactcgacccgacccatccagaactcacacctggcaatgaggagggaattttcggatttgtttgcggattgcctggcgagcttgaccatcacctcggcctcagaggggtcttcatggatgatgaagttcgaagctggcaagagataagagccgacctcgacccgatagtacatatgtaacaaatcgttgttagtcagattgctggaattgctgttgattttttttgcaagaaccctgagcctgtttgtttcttctcgtatagcgcgggcttccagtgtgaggtcttgctctccccgagaatcgagtggtgtggtctgccgggagctcccatcatttctcgtgtggggtatgttgtgggacatggtcgaagtactatcttgccccaatagggtcctggattaatcttggtaaattgtgaagtaaatttgatgggattgccgtttgtcttgcgaagatccaaaaattcgcgtcagatagaagagatacgatagaagaaaatattggtagttcgttggtgaaggaaaatagcaaccgagaagagaagcagtggccttatgtacctcacaggcgtgttgaaaagaaagaaaacaaacgcgttgaaaatggtccgacctagacagttacaaacaaaggcatttgtttacaaggagactttggtgtcctttcctttgtttctatcaatcccattgttgatcgcgctggaaccaagacgccacattctatcatacccttcactttgtgtatattttggcttgatatgtacaagttaagtaataaataaatatcattttcatggctgtttatgtagcactaagtattctccaccctatactagaggtgctgtactggttcagtcaatatatacacactggatacaactatgacagttactttaatggggttggcaaataatatagataaatttaacctactacaatttactcgaaacggaaatacaaactgtggagttttggtttattggatttctttctcaagcaatattcatcagtttgaagacatcacaacgagatattcctataaggaatgatcattattttgtcacctattcaaggataatcaacccagattcgtctcgaagggccaatcccgaagttaaagaatgagtgacccctcaagtagcccacttttcaacccgattcacaatctatatctggacactggccgaactgcttattgcaagagtcatgtatcaatgaatgaactggaggaaataccaaagtagccacatcaggccaataaacagtgcttttgaagtcggctgtattttcaacgttgtttaccatcctcccaatctaataatgcgtgggtagacgctgccggtgagtgatcaaactcagcagcctctattcgagtaaacccaatgacagcctccctttgaatctcacgggccttttcgctatagcctggtattacttgtgcccgcgaaagcgacagataagcatccgggaatctatgaagtttcatgaggttcattcctttgataaaatgagtaatgcaggcgataattcgagattctgggttgttcaagacggcataacaattgttcatttgcacaaccatctctaggctcatcgtggattctttgaattggcaaagatggtgttggacagcagcaatgaaaagtcgacatcgcatctcatcaagttcgcataaaaaagggttatctctgatgacctgcgaggcaagctccattgcaagctctgggtcatcatgtcgccaccgctcttctgcatctaccagtaatgagccactgtaggagcagagccagatatcatccatagatgtacgcgttattcctgtgggcgaaattgttctaggaatgtcagacagagactgggaatcagattgaagaggaggaacagcgagagtggggttacttgaggtggtgtgtgccagcatgaaatcggactctatgagccgcaactgaagatcgtatactgcatcgaaggctcgacacaattcttgttctagttcggcaagttgggaacgtcgggaacgtcgggactggaagcgcttgcgcaaacgtcggaagatattagccattttggagtggaaacgtcttttgatgctctcaagctgatgaatactttgagataattctttcggggtttatatacttgtccatcgagcagtttccgggatggcttctagaggacaaccgcccatactgatgaaagagatcattgtttctttgagcgcaatcatattgtactacctgagtcagaaacattgtttggaacacgctttgtcccaactaaatatagactaacatctcgaagccgaaacggcgaaaccaatgatgtgactctgtgccaccatgtggttgagtttgtcgcctgatttctagggcaacaatgtgcaaaccaagcaaacattgcaaacggacaaacatagcaaacacaaacagagcaaacttgacaaatgcgacaaacatccacctatgacatcatctgcccgttgctccccaccttcgtactccatacctacagcacgtcgcctcgcaagatgcaaccacaaagtggaagagcaactgcgggccaatgagctattttgggtatttcccgtgctggccgcagtgcccaaccggtaggaaatacccaaatttgtttagcggcagagcgtgccagtcaaattagtagtattcttccgacgcggatgtaaatggcattcgtaggtgcgtgaattgtttgaccaatctgacctatctaattcaatctgtccaatcctatcctatagatatattaccgcaaaatccacttaccggatcagcccatggatctagacttgggtaggagttgtgttgcaaacacgttcagcaagacaaatccgggttggagactaatctgttccttgaattgatttataaagcctgcatagtgcccccctatagtttgtagttacttccttccttattttactactcttttgtaggccaaatcgtcatataacaacccgtggaccttacccgatctttccgttctctaataatttgtcatagagagttagtttgccaggtacgccgatttgatcccttgatttttttttaaaattttgatgcctgaactgacatccatgcagtcatgtctcctaccttgctcagaaacgtcgacacggttgaaattgtgaacatccaccaggatgacatggaattctcgctggtggatgagatctacaagagcctggacccaccaaaaggcaaaccgcgctcattccctacgcttctactctacgacaccaaaggattgaagctcttcgaggatatcacctatttggatgaatactatcttaccaacacggagattgaaatcctgacaaaacatgcgaagaggatagttgcacgcattccggagaatgcccagctggtggagctgggaagtgggtcggtgacaccccacatctccatccgtcgcctcgcgcggcttggtgatcttgatctttggcccaagttctgacgatcttctttttttagaaacctgcgcaaggtcgagattctacttcgagaatgcgaacgggttgaaaagaaagtggattactatgccttagacctctcattgggggagctgaagcgaacattctcagaaatttcgcccgagagcttcactcatgtaggattccatggtcttcatggaacctacgatgatggtctcgactggctgaaaatcccagagaaccgcaagcgcccgacggtagtcttgtcgattggctcatctatgggcaattttagtcctccgggtgctgcggaatttcttggtaatttttccaagcaattgaacccgtccgatttcatgcttattggattggatgcatgcaagaacccggagaaagtgtttaatgcctataacgatgccaaaggtgttacccgccaattctatgagaatggcctcctgcatgccaatagggttcttggcttccaggccttcaaggctggtgaatgggaggtcttgactacgtatgatccccgtggaggacggcatcaagccttttatgctccgaaagttgatgtggtcatcaatgggatcaagattgccaagggagagaagctggtatgcgaagaggcatggaagtacggtcgcaaggaacgggatgagctgtggcgcaaggcgaacctcatttccgaggtcgaatttggaaattcgacagaagattattgtgagccctcatgttctgctcgaattgtaattgcacatttgttgactttgaacagaccttcatctgttatcacctgctgcacttcatatctctatgaacccttccaagtatgcagctcagccgatcccgagtatcggaaattttcaatctctgtggattgcatgggatctcgcgaccagaaccatggtccctcgcgaggagcttctgtctaaaccgatcaaactccggaaagcactgatcttttatattgggcacattccgacattttttggtgtgtctccaatgttcaatgttgcttgccatgttcactgctaattatgctgaaacttagatactcacctgacgcgggctttgcaggagaaatctgttcagcccagtcattataagcggattttcgagcgtggtattgacccggatgtggaagatccaagccaatgccatgtccacagcgaaacacctgatgagtggccgccattggacgaaattctcgactaccaagagaaagtgcggactcgtgcacttacaatcctacaagagggatatgcgtcgcaagaccgcgctgttggagaggctctttggattggatatgagcacgaagcaatgcatctcgagactttcctctacatgctaattcagagcgataaaactcttcctcccacaggagtggatcgcccgaatttcgagcaaatcagtctccaggcaaagagaaacgaaacgccaaacaaatggttcaccattccacaacagactatcgaaattggattggatgactccgacgatgaagttgtaccaagtaaatcttttggatgggacaacgagaagcctcaaagaaaagccaccgtgcatgcctttgaagctcaggcgagacccatcaccaatggcgaatatgccaaatacatacaggataatggtattcaaacataccctgcatcttgggtatttaaccagggccaagacaatcccatttccaagggtgtcggttcctcaggcgcccaggccgggtcgagctccagtcctgcaggattctctctggaggacgtcacggttcgaaccgtcttcggacctgtggctctaaaatttgcacaagactggcccttggttgcttcctatgatgaagtggccagctatgcaaagtacatgaaatgcaggatccccacgtttgaagagaccaggagcatatatcactacgcagaccaactcaaggctgatagagttacaaatggccacgggtatgaaaacaatcatagctatgatatagcaggaactaacttataaaataggaatggggtaaacgggcttgataatggtagcaagccccactctactgatcagactattttccgtgatctcaccggttgcaatgttggctttcaaaactggcaccctgttcctgtcacaccgaatggcgatcggttagctggtcagagtgaaatgggaggtgtttgggaatggactagcacgcccttgaagccgcacgacggcttcaaatctatggatatttaccctggatacacaggtaagtgatacttgagcatccccaccgaacccaagcttatttgcctcgatagcggacttctttgatggaaaacacaatatcgttctcgggggctcctgggcaactctgcctcgcattgctggccggactactttgtgagtataaaccctatgagattcaaaatggatcaactaacacattttagtgtcaactggtatcagcataactaccgttatacatgggcgggtgcacgtctagttagagatctatagatagagcttgaacaatgccattgagccctccagtgctcaatgaggatgacctcattctcgcgataagagataaacagtggggagcgtaacgtgactgcccctccttccccaacatcatctccaattccatgtcttctcttcattctagttgaattgtaaataccttacatgatgtcgctcgaaactattacaactatctccccggccaccaatgagcctgtcatcactcgtaccggtgtctcatcggaggacttgaaacagatccccgtggccgctcaagcagctttccggtcattctcacaatccacaactttggaacaaaggcagaaaattgtggaacgtgctcttgacatcttggagaaaaagcaggatgaattggcacgtgaggtcactgagcagatgggccggcctatcgcctatactggtggtgaaattgcgaccgccatcaagcgcagtcgttacttgacccgcattagcacatccgtactaggcgagcaaggagttgtgcctggggaggaggagaagggattcagacggtatattaagcgttcacctgtcggcgtggtgctgattatcttcccctggaacgtgagttcaagtcgtcgagatattgatatacctacagactgctgataagtacatagtacccctacctcacccttgtcaacagcttgattccagccattctcgctggaaacgctgttgtcctcaagccttctccccagactccaacaattgccgagcaatttgcctctgcttttgcggtggccggtcttcctgaaaatgtgcttcaattcttccactgcggatctttcacatttatcgagaccttggtgcgatccccactggtgaaccatatctgtttcacgggttctgaagctggtggcctgttagtgcaaaaggcagcctccgatcggattgtgaatgttggtctagaacttggcggcaaggacccggcctacgtgcgggacgatgtagatcttgcctgggccgctgaggaaatcgtggatggtgctatcttcaatagtggacagagctgttgcgcgatcgagcgtgtttatgtccacgagaagatctatgatggtttcattgctgaggtgaagaaggtcctgagcaactaccgtgttggcgagccttctgatcccaagacccaaattggtcctgttgtctctaagcgtgcgaaggaggccgttctcgcgcaaatcgaggacgccgtgcagaagggggcgaagaacgagactcctgccaatgagacctttgagaacttccctccgaatggaaattatgtcaagcccacgttgctgaccggcgttaatcatgatatggccgtgatgaaggatgaaacctttgggcctgtgattcctgtaatgaaggtctcggatgacgacgaggccattcgtctgatgaatgatagcgacttcggtcttaccgccagtgtttggagcaaggatgttgcggcggccgagaagctggttgagcatgttgaagctggcactgtctttgtcaaccgatctgactaccctagtcccgtaagtgcaactcttagcatatatattattgtcccccctttgctaaccaaagtaccctacaggatctcgcttggacaggctggaagaactctggtcgcggtgtcaccctcagtcgattcggatttgagcagtttgtcaaactgaagagccaccacatcaaggattaccctaaataaacatgtgcatgtgagataattacattttggtcaggcgtataaatttcaccacgtagaccacgactcagaatcaagagtactattctcaacgaatcgacaatttcttttctccagccatgcccaggtgcggattagaggagtatgaaaaaaaaagaaacagacttatcttttgcgaccgcaagagcctcaacaacctcgctttttgcagtgagatcccaggctcactatctatatactggcaagcgtgctcttcaatggtactacatcttgctcatagaatattttgaagggtttcatgacccacttgagtaaattgttggaaagccggcttgtaattgttcaccaaattcttagaacatcgagattttacttctaccttattttctcgtctctaatatgagactaaagctacgctctgcctgtccatgtaacgggcttttgtcggctatttgagtttgtttcaggcaggtgctaaaaatacaactgccaactgtcaactgccgaggttgtagttgactcacctctcacccggcggcgtattgcgaggatcaacaaaagctcgatcaactctctaggccctcgtcatgatgtcaatcccattgtcggaggaaaacccctttcaatccttgattgccgaggcaaacgacgattcggtgggtggatgcgagaattatgaaactatcagatgtttaaccctttttgatctaataataggcaataatacaatctcgatacgagaaccaccgagtggctcgcaatagccagcaaagtgcacaaattctagccgacggctttccaggctggtcccttgacgagattttgaagcgacttgatggccctgagaaggaagacggatttgctgatcctcgaaactgtcttgtcatttgggccagaccatcgcctcaagtctgcgacatgatacgctttattcagaatgagttgaagagcatttctccttgtaagttcaccaatatagaattccctggcgcgggatttcctttttagcccttcatttcgctaacatgagtggtcatagcactctggttgatgccaccttcaaaccttcacataactgtcttggaagccgctcattccctgacggaagaacaaatcgaagaacttgttcagacactcctgtcatccaaggatgtcacgcctgcggatattgcggcatatccacgcagccaccccacgcgtctcatcaagcctatgataagctttgattctgccgcactagcgctcagctttgttccggctgctagtgagtgcctagaaacagaacctagtagcgataacgagcactacacataccatcatcttcgccgtgatgtatttgacatggtccgacaagccaaggtccctgttgcttcgcgttatatcgttccctccgcacatctcaccatcgcaaggttcatctcccaggatgggtttctagtcaggggatcagatggcgcagagacggtggaccattcgcgagtcaagctgttgattgataaaattgatgagattaaccagaggttgaaaaatgagtattggcccaaggagggtgcggatgcggtcagggacgggggtgaatggattgttgggcaagagggtctagtcattcggagaggccgtctttggtatggagggggtgaggatgtgccacttgactagatctttgcgttggaagattgagctctgcctattctcctagactagaagggttttgcatgttgactatgcgtaccgaattccttaactagaccttcctctacgagtcgtgctaccgtttgccaacttacgtgtcgagcataatcatgaactatcgcttggtgtatggacgatgaaaagatccacataagatatatttagcaggcgggtgagcgccattgcagagtcgtatgtcgcaactatcagtttctgtgcttgaaagcctgagctcaacccacgcgatgtcacgtgctagtacaattcctcaaaatggcgcaaaagaagcaatgcaaatgtattttaatgatagattactatatcagatggtagatattcaatcataaattccaataacatctactgaaatcaaataagtcgaccttggtgagcgtcaaatagcatttaagcttggtcccactctgctttgccctataaagcacattggttcaaaaattacaacgcggccggctggcccaatggcaaggcgcttgactacgaatcaagagattgcaggttcgatccctgcgtcggtcatctctttttgtttcttatttttttgctgtttgagatttaagagtttctgctacaataattgttatagtggttaatatttcaatccacgagtttgggaaactggaagataccagttgaattgcagagtctaagtagattgataactctgctttaggcaagcccgagaatacagtagactgggtgatttggtccaatgtgatcatttctagttcaggtgatcgaacaatgagcgatgcatttgttagatctatgagcgcacccccgaacctgtttattataagaaaaaaaatatatcagaagataaaagcaacataccgggaatcatttgacaagaatttcaaactcggatctgtaatattggcttttgggttggaaagtagccattctggtattgcgtgcggatcgaagaaggcaaggatattcagcagtattttcccttcgatggacagggatcgagaggaagccttgcaactcgttgacccatcttcatattgcgaagacatagtttatatggcgaatatattctcagtaggtttttttatagacaagcaaaccacataggaatagctacggtcatttgggaataggcaaaaccgtctcaactggccggcaaaatgcggagttaatcttggtatctcggtatgtatctctggccctaatccttgtcgacttctcgcgttcgtataatggaggaaaacaggagatggattcctatggacaccggatcatgttctgctcatcacacaaattatgaatcgtccctcactgcatgaagctcagcattgtggaaggttaagcgcccgccaaggccaattaagtgagcgttttatgtcgacctacatgatacgttgcccaagtcatatatataatgaacaccgaaaaccttccaaccatagtcgattgcattacttccatttccaatcagacaaacctaataaaatccgacctacgacgtttcctccgttaaacacgagacaataagcttccaaatcagatcgccaagccacgtacactcaattaagaaaggctcggtccgtcatagcacgctatttcatatcaaccaataagctttcttcttatttgctccacatagtatacgcgcccacaatgtactgaaagctgaaagctgaaacagtcatgaaggggttaatgcggctgggtaattttagtggcggagatgaaagcgataggacaaatgcgatcctggtcaatattaatcctatactatccggcagcagtcaagcaacggattagcgttttcatttcctataataacgccatactatggtttccaacaaagccagttagtagcacagcagcctattcatctacaaagaatgtttattaagtgacttacaggaaaccaacgagcccataagatttctatctctagagcgtttttggtttttgctaaggactcccacaatgacctacgaaaaatacaacctcgggtcaaactacgaaggacacataccacgcatattagcatcgatatgagctggtacgacccatggctatttcaacagctgcagaatttacctcacagccttgtgcaactccgagttggaacatgcaaaattcaagacaagcagagcctaaaaactctttttgagggcattgaagaatactgcgcacgggaaactgaggcggtctctattgatgaaatcactgcatacttacgagaaactggagtcttcgatcacacaaaggcgctgcacggccatcaaacgcttcttgtctttgccgctcttggttggcgttctatgttgtaccaagctgctttcaacgtctgctcaatgcaagaattagctatccatgaagactccgaccagccacagtcaggtcttgtttttgatatgtataaaatcccggctgaactgtccgaccgcccgatttctgttctactcaaagcttttgggcaccttttaccagcgcgatcctcgaattctcgctatcttgcaagcgaggttggtgggatagcatctatttggcagcccttgaatcccgaagagaccaatgcatatctacttcatgttttgcttcgtgttcaaattcgatgggtcgatactctatcactgcaccttgactatgacaaaagcactaagaccttatgcctcttcagatatccgtcattttgtcttgaaatgcttcgatcccacgggttgatctactctttttctagcaatgaaagcttctcaggggatcctcgttcaaacgaagaagaaatttcgctatttctgcaagaggtgcttttatcctatcgtcttctttttgcccagtcggccccatcgaggaaactctttcgccaaatatatacgatgtcggatttgcagagctacccgacagattccttactttttcagttgtgcacccagaagcggattgcgttgacaatgctcccaacagacaagccaatctatttcgctgcccgagactttcccgtgctgtatgacaggatcgagctcatggctaatgatctcaaggatgcaagaccaagctcaatcttcagtctgatgaaagacagacgtgatactttgacgtactggacattttggcttgtggctatgttcggcggcattagcattcttttgactttggttcaagttatcttacagggcgtgtcaatgatgtaggccctattgaatgaataatcaagcatcgagctatttcaagggtatctagtatgaaagtgaattcatacttcgcaagtcgtcacatggccattaaatcgggcagaccttgtgttgtttgaaggggttgtctttccttcatccatctcagtcaactgttcatttcctttcgtgtcttctggagaatccgaccctcggcaaccaagtacttcggtcatgtgatcgaaattatactaccccgctcctaacaatgtccttactctgaccctcctccattattctatcatacagaaggaatatccaacatgtcgattacccatatcgttcttttccagttcaagccggaagtagccgctgaggttgtccacgatgtacgttttttaccaaaattatcacagatgaacttgactgtgtactataaacccttaatggatgttgacaagtacctcaaaaggcctgtgagcgtatgctaggtctcaaggatagttgcgttcatcccacctcccagaagccctatatcaaatcggcgtctggcgggaaggataactcttccgaaggtatccaagtaagttccctgggatcccagaggacgaactctgaggatatcttactaatgcatgatagaatggcattacacacgcatttgtcgtagagtttgcgagtgctgcagatagagactattatgtacaaagcgatccctctcatctggccttcgttaaaactcttggtgggatcatcgagaaagcacaagtcattgacttcactaatggagttctctgaggttctcagtgactgcttcaagtgtccacatatctgattttatgggacatatagatactgtgaaagaatagaccgcatgttatattcgttcgcaatcatatatacgctaccaattatttcatgcagcagcctagggacttctagtacagattatatatcagcagctaaagctttctaacttggctatatgccttgcactaatccaaaacttggtatttgggcagacctatattttaagattattaacatactcatgaccgctcacccatagcacagacaaatccagagcatttgtgggttgatccgcagagtgcaaatatttctgtgtacaaacgtccaacaagaatggatcctcagcgcaaggaataatatctcccggcaaaatagtaaggctcttctagatctagagtttaatgaccaggaatgtaagccaagctcgaggttcgcgaagcactctgtcggagctagccgatgcgccaataatatcttgttctcagataggcaccgggttttctagctgaaaactctagatctagaagagccttgcattgcgaggactgtaagcataccaaatccgagcttagtacccatgggtttaacgtttaccagaattgtagttatacgttggatacctgaagacaataagattcaatagatgtttagattgagttctcgtaaatatatcatcgagcgtatttcaaaacttcaagaattcctcatccctgcggtttcggtaagttagggctctactctgttttctcggtgaaacaacctacaacaattatacctgacatagagaaattagagtaaaagatagcttgggtcagttcttctgctgtcttccatcttacaattgatgatatgaatgagcactgcgtgaaacctttgtgagctgttctttgactcggcattgctccgaagcaagggagaagcgagataaaaaaacgcgccaaccattcccgagcctcgcagccacccgcaaggtcttttatttcgattgaatagcggaacgggaaacgggaaaccgaatggagaaatttgccttgtttcggaatggccaatgtggctggaacattggggtgatgttctcattgtgaaaggtcttaaaattgccttcattgtctttgagcctgtgtatacacttgacctccaagaggactaccgaataaaccgcggtagatatgaacacatagttatctaacgcgaacaatggctcaacccgcaggatcacccctgtcagtgataaattcgtaatcgatcgacacggctacgaagctaatgatcgacgatgcatcctaaaattggttgccgagaaccgggtcttatgaacgcccgatttccgagacaaagacaaagaaaacgaggcaaagaaacattttaattgagctggtgagcttgcatggaaaagaagaaaaacctattatccccagacctaggaacaaggaatcccgagcttccaagaccctcacagggttcattcatgcacatatccgactcggcaaacggagatttcagggatcggcggctagttagtattattgaaatgtcgtgtacagaaaaaaaaaaaaaaaccaaaaagaaccgaatagacaaaactttaaagaaagataagtctctaatccaaaagtggaaaaggagacacgaagaatgagagggatatgtttcgccagcacacgaggttttctctgcttcttctcccttttacccctttggtctgggctgctttgcacttgatccactgaggggcgaatacctaatctgcatgggtctctaacgccagcatatcttccctgcaggctgcaggtcatggctgccgcttgtaatgcccatctatattgcgtccgatgagttgcagcagatcgtgggtgagagatagatacccgtagaagcgagatcgcctcgggggatagacacttgaactctcaagagccggaataggtcaaagggacttcaagcattcggaactctctgcgcaaagccaatccgatgcaagacaggctccccagggaggacccactgccgccgccagggagcgaactgccagattggagtcctgccgagcctgtcattctctccatgccagacggtggtcgcctagttcaaccggggtgagactgtggatcggttcgtccttgacacgccgagaatagcatagatgtgcataactccatactaatatatgtgctctcgcccgccggttctttgactctctttcattctctaagcacacctcaatggtgtaaagcggttgcaacctttttcttttttattctaattttctttgggtgttgtcatccctagtctctcgtttcgctttgtcactcgttgtatagtatttgttgcacctccaagcgtcgcctttattcctttcattgccttattcgcatccaaggacatcctagctggaatcgccattgttgcaagtccccgcgaatcgcctagcactttataagagctccttatccgccgaccggatcaaatcgaaacaccatcaatccaacatggaatgctttcgccaaattttccggtgcctaaaggcacctttcaaacgcgacaagggaagaattattgaaattgtaagtcgagtcgaagaccggggaatcgttcgtcattgcaaagacggtcgctaacaagtttatgaaacagggtcctcccactaatttccgaaaagaagaattgcctgcttatttttctgatgccgagtcagttctctcgcccagccaagatccagcggaacgatcaaatctgaccaatcaatcacaggacgcttacgtccgaggacagccgcatagcgaccgtggagaaggacgaaacaacgatcgagatgctatcgctaccatcgtcgacgaagagcaagatgcgggcccatgttcgaagaatgagcgtgagactatccgagagcgcgtgaagttatcccgatggtggaaatcaagcccagcttcagatcataaaactaaggccccggctgaatcgatcaagatggaggaaatgcgaaacgccgatttggcgtgttcatagggaaattgtgcattggtatatggatggtcacaccaagaaggtgggcacttcggtgtgccgggatctttttgcatctaaattgttccctccgcctgttacaggcgattgtcttgcaggagattccttggacttgtcagatatagagtaatttatccgagatgactctggtagttcatcgaggtcatcgaaaagcgattgaacccgtgatttatacgcgttcgctggactgggtcgcccatgtgtcggcttcgctttcggttttgacgtagacatgcttggtatttcaaattgttgccgggctcgtagtgttgtctgatcgtgagcctgagcttttcgtaaagtggaatttgttcccttgggcggtggtagcactggccggggttctaggtcaagatcgtcatcgtcattgtcatccgagcccgaggccgtctcttcatccagttcaatgcttataacttctgatactcttgacggtgcagtgaaacttccgatactgttcacccgggctcgtccagtagccaaagtcggtgcttgtccaaagcccgcagcagctctagtagaggactttggcgcgtgagctcccgctaaagaccgggtttttcgtgggctcgtcataaggtcgtggagatgtgttccagcccatctctcatcatcatcatcttcttcatctttctcctcgacttctccatcccctatatgtgcgagtccagctttttgtcgctccctcagcgcttcagcttctctttttcgctcaacctcatttggtagtgaggtacgcccgtctgtaggcctctcaatttctcttatcccggctgcgtgttcggctttcacctgctttcgccgtcgcaggtactcggcgtgatgtagatgttgagtaaatgtttgcgcgacggcgtagaactcgtcctcgaccatgacccagccgtcatcgtgttcaataccctcaatcaaaaatctataacgtgcttgttagcgacttcgtctggttgtgcgtggtctggttgcgatcatactcttcggatggacaacgtctgatgggagaggtcggcgggctttgggctgtacaaagtaatcagtctttatgtttcgtctcaaatattcgaagattagaagagacctacatgatctgaagaaatcacgcctggggggagaaactcgagggtttttgggagtgaggtcgcgatcagcaagttccgtcttcacgcgcttccgcggtgttgacttttttttcacaggggtggtattctcagcgcgaagccagggcaatgtcctgggcataattaagataatatagaccgaaattaacaggtcgcttggtgtcgtgattttaggggaagattacagtggagggaaagagagctgataggcatccgtagccgataaggtgaggtcacccgcattccgcgcaaaatagatcttcgattttggagcttcactacggactggagaatttgcaagtataagcctcgttatttggggtatctaatgtcatttggacattggtaatgcaagatgaaaagaactgggatggcctcaaacgccccgtgcaggatatatcaccgaaatcaagaacgaactgccggtagaacgccattcaagggaaacaaaaaaagaaaggaaacgccagcatctctgcaagcaaaagtccgattacacctcaccaggccgcttgctattgcagctcacgatcttcaccttgtccgcggatacagttgtctggttgtctagcttgaacgagacatccttgatcaagaaggtccagacttcgtcgcagaatcggtaggtgtcgaggtggccctaaaagaagtagaaaaatgtatacatcagcctcattgaactatgatcaagcaatgctcatctgggcaagggtgttctctgaaccggaatgagttaccttgaaggtcagtctggcccgaactttgtccgccaagacttcagtgacaatcttgtcaaaggtcccaaggatcttcatcgccagctggggctcgatacggccctcattgatcaggtcgtcgagggtatcggtgagggataacccgaggctgaatgttccttgggtcagttctgaaactttccgtttgtttcatagggtatattacctgctgccacggtaaagctcatagtaagctactgatgccattctgagataaaataatggcagactagtcgagagagtatcgggggagtgattgacaggagcaagttcatgatcgccggccgaatcgcggggggcggtcgccagcacgtgatctcaatatggtcacgtgtatattcttatctcaaattgcgtcagagtcagatgaattgaatgtgttggaacttatttttgacatcacaaaactctcagtaaacagacgacaaattcttaaaactactgcattatgattgtgaaggggttagggcctcgatctcctctcaatagaagattgttcagtcaattgcaagttcattgtgtacgatccttatcgacaagcttgttcagaccatcggaagctcaaggtcagtcagttccgttcaaatgcccaagtcagagctaactgcaatgctcctgaattttagaccctcaaggctaccaaattactaaatccaagcaagagaaaaccaatcagacaccagacgactcctcgaacaaagacaacaagtcacctaagcccaaaactgtctccgaagccgacgccgagcttcgtgagcggctggaacatatgtctggagaaggtggggcctctggaattgaatacgaagacggtaaaccgaatgcaatgaagcgcggcgtgcgaaacaacatgtttcgaataatctgaagcaatcttcgacatcaacatatctcaagacaacaaaccttgaccatctcaaatgttacaatatatatcaagtgaagtctcatgttctggaatctagacttggccccctgtgggaaagaaatgttctcaccgtttccttccggcctcgggggttaaagacgtctaccaggaccagacttgaatttgcttctgaaaacatagatgaggatttccagccttggctgcggttggctttgcctaattagtccgaatatgtgcatgtggatcttctttgatacagatacaaggtcatgcataatcaaatgcattccgctcttcaggtgttcgtgcattctccgatgacgattccttaggtggagccacgcaatcagtcacaatgttctcgctgtgaacttctcgactttcaatagttggaatattcctgcacatgtgccattggaaagctttgatttcgttaggagatgacttcattgcaatgtgcagggtcttgggccagagcaagtgcggtgaattgcatgcacgtcctgccagtgctcggggtagtgccccataggctgggcttcaacaccgctctgatcggcggtgaagtcttccttgtagaattggattttgacaagaaaaatgagagaccataaacatagcgagccaatataatggagccgaaaatggactagtccaagtacaattaaagaataaatcaatggaatcaggaccgtccaaaataggatcacaatggcagaaatcagatatcatttctatgcagtgagccccaacttgaattcaaagaaacagacattatcctaccaacacctaatttcgaaccattttcgcattgccgaattccacccaaaggaaaaaaaaacaaaaacagaccaatgcttgctaacatttcagagaaaagctcatttccgcacaaccatgccagccaaaacaccagcgccaatgacaccaccgtcggatgcttcccgtaaaaataccgacttcccacctcgttgcgggccagttcgcatgataagacggtcaatgtattgctggcacatctccttgaattgcgggtaatgttggataatgccaccagtgtaagccacgacgagctcttcaggaccggactgccaatctatcggcgtaggatcgaggacaggcacgacatgttcctgggctgcgtggctcgcagcaacagcggcagagttgaggcttgcagccgcagcgtccggtgcactaagggactcagtgatggtgtcgccgtggatctgaggtgaagcgggattctcgggtgagctgctgttgctatcttctttcagctcgatctcgcgagcacaggctagtagtccgaccactgcagcggcgatcagcccggctgatcgtctctgtacggtgcgagcgatctttcggaatgcgcctgcggctcgggcatcccagcgccagtcgctgcactctggtggggggagggatttgttcaaggctttggcgagatcgttgtcagatcgggctttagcaacaacgtcggagatatatgtggttgtcagggcgtattcttggatgaggtttgcaggtagggagcgtttcgataatttggctactgttgtgagatagtcgaaaatgatcaagcgaattagttcaccaatatagcggcctccagtcatgtattcaaagggctgaaagcctggccgcgaacaggcctggtctagctcaatgtcccatttcgtggtcacattgagctccttgagtggtggcgcagcacctgaaatagtccactcggtgttgacaacagtctccacagcgctaggctccattatgttcacgctcttggctttcgattcgtgcaatgcactaagcttcattgggatggttgcgttacagccagtacccacaatgatacccatggcgactctgctgtttggtagagatttgaccttgtatgcaagggaagctagtgtggccaccgtgtcattggtgatagcttggattttcagttttggtaatgcaaaaagctttcgacgtttggttgaaggttcatcttcatcatcgggtcgccttgtgtgtttttcatatccatctagaagtatattgccaagattgaggtttgacgagatagcgaagcctttccccatgggcattaatgtggcttctgctaatgattcttgcctgggcttagttagtacaaaatccactacaacgcgaagggaaccacacagcccgacacccataatacaagcacaggcggaaaaactcacatgatggggaaactgaatgtgattcccatgtccaattcggcggggatgtcctttttagtagcatctgatgatagactctccgctaccacctccgcaatgcaatccccgatccaagaaaagagatcctcagccttatccatcttcaaatgttcttgaataggccaagctcgttccagcgttcgtttcacccgctggcgctgagctttccggatagtgtcgcgtgacctctccgtggcatctgtaggccgaacatcggaatcgacggcttctccgagtaattcgataaaagcgactcgaaggttgctacctcctacatcgatcgccagatagcgaccggtttcccggccagtaggaagttgagtcacgggtgttggcaaaaattgctggtccgatgtcagggcaaggttgcggtatgtggtggaaaagcgccgggccagtttatacagcacagcctcatccaggaacagcggtgacaaaaattcttccaattgttgatggtgcgccagacattcttgttcaacggcgtttagttccgaactagcctcctcatcatcttcaatcagatcgtcgtgcatgatttcgtgctcctcatcctcatccttcttggacgattttgagttaaccgaggccatgatgaaggatagtagatataccccaactttttttttagaaaaaaaccccttatgtcaggttgaaaattccagacaaaatgagccgagacagctatgtcaatagtgacgtgtagggtctggaatgtttaggaatagagacagggcagcatatccttaaaatccttaaaatccttgaattgtggagacaagctaccggcgctaatccaatgccccaagagctagtcttgttgtgttagcgaggttgcaacaaagggaagataacatttcggtgacgcggtctgcaggtcgtccgggctgcgggggaaaaagagaaaacacgacgatcatgccagaattggaaaccccatatatggtttattccgtacataccctggaatttggtatgcacagattgcgcagataatgaaaacaatatttctgggggattcggggagatgggatgacacagactatatacgggggggaatcttttgggccaagaaaatacccctagatggccctgagggattgggtgaagaatggaagtgtaaagctccctgcttaagacgggacagagggaaaacaaaagaggaaacagaaagagacaaaataatatatgggatttgttcaacggtacctttatgttttggtcagactaagtattggagtcatcggaagaatagtcggagaatagtcggaagaagtgggggggaaatgatccctatcagatgctatgtatatatgatcagatagaagaaagattagacagtttattagaggttataaggaagaatatataagagatgggatgcgaccatcggaagacactaggcaatgcgacgctgttcgggacaagttgaggatcgccttgactttctattggattgggaaaactctacttggctttaatatcccctctttggcgtctttataaaatcaacgttgcgaattctatgtaaccctacattaagccattatatccggctaaacccccttccctagctttaagtagagattatcccggagagccaagccaacttctctatcttggcagtctcaggattagacaaaacacacgagcctgcgtattaaagcagaagttccaatctgttaccgactaatatgcctctatgagggatattggtggggttgaaggattccggcttggaaaaacgcgccaaagtatcgccaatgttgctattcgttcaatacgagggacgcctaagtgggatatcctacttgtggcactcgcgtgatcggtccggacatgcccatattcagacgcaggcacatctcacgaccttttgatctgacgggaattaagccgttcgcacggtctcgatcgttcgctggcatccgccacatcaggctgtcagatcttactagaggcggttcaaactacggggtaccttaccttggggttgcctgcccataattggtcatctacctgtcggcaaatagtccgattgttctcgtgtttggcataattctatcgatagaattgtttacttcgtaatgaaggtttcatgtacgagcctcaaagcacgcgatctcaagccattatgtacagtctgtccgtagaccatacccgacaaagcctagtaattctagacctggggctattcgaaacccaagctatagagtagtcgatgccccatctaagttgtctccgaagtcggagcccagcctaatctgatgaatgtgtacggagtacacggatatgggtagaccgtactccgtatagcctcggtgattaacggagcaaactacaacatacacttaaaagtggacaggatcctaccaatagtaataaatatgtaataatcacagggctgcatccttattagttaacgataatcggtcgggctcctccgtagcttagggtagttggggaataccttatgtaatggccttggcagcccaaggttcacctgggactctccacatgatcttatcaaaacaacgtcactcctgattttaccccatcatggagaaactaccgatccactctaaggagggatatggtgaccctcttgaattagcaaacaaccctgatcgtcgtgtgcgttctagcacaacaacctatttgtatcggattggtgtcgtcgcgttgctcttcgtcggctaccttgtgcttctacggccgtctcacccatgtaccggcatagctccacaaacggagagctatcaagctgaggttcaacaagagtatgacgactacttaaagctgggacattctgctcctgatgcacatcaaacacttgaagaaaataagatcccgctggaggctcacatcatgagcaaatgcccggatgctcaggcctgcttgcaaaaactggttctaccggctatggaaaaaataagtgacaaagtggacttcaagctatcatttattgctaggtgagcatcaaagtaaatgtgcagaataaccgatgttattgcaccagagtccatccgaaacatttgactgatactataataatagtgtgtctaaagattccgaagagatagcgtgcaagcatggcccaggtgaatgcatcggtgacatgctcatgctctgtgcggccaacctacctttccctcctaccgcagacgaagcatctcttccatctcagtatccccggacccctatcatccggtcactaggattcgcaaattgtctgatcaatgactttgcccggatcccagaccgcgagtttgttcaccaatgtgcaatggagcatgggattgactttgacgccttgaacaagtgtgcgagccaggagaatgatgatccgaacgatggcaacgacggcggaccaccacttagtggaattgcgctgctgcgtgaaagcgctcttcagggcgaacaactcggcgttaagatcagttgcacagtgcgtctagatgatgctgtttggtgcatccgcgataatgatgaatggaaaaactgtgtccataatggagcaggtagccagccctcagccctgatcgatcaagtcgaaaagctgtggaaggagagaaactgagttctacatggatgctttatcgttcataccccgcattcatacccatacgataggacatgacactcgataaatgccattgatgatcccctactatcatattgcaccaccgtaggcattccctacatttcgagtaggcgcttaagccatgccttcccatatgaactgccctatttggtgaccctaactccatgtgtgtcatgagttgaagatggtgttttcctcgcttaatttaaacaaacaatgcccattagccgagtcacgcacagttttcctcgccattgttgcatttaatcaggtcagagaccttttcccttcaccttcctctttctctccccaccacaagccaccatcagcacagtgcggcaatcgtcctcgaaccgcgtggagcttcgcaatgtcaccagtttctcatccaaaacagcgtggtaagttgtttcagccttgatcgactctattaccatcatctcgtcatgctaacaatttgggatgatagaggccaaatctgtcatgtcgcgcggggtgtgtgataaggaagagaccttgtaccttaagtggagtctggtgctgagcccaagcgagcttctaaaagagcttgttggcgacagcgagcatgctcgagccctctttcatggaatgaggcgccaggtccggtccatccgccgccgctcgcagtcctatgatgatggacaggtcacaatctacgaccgtgttctccttcgtctctatgacgagggacacactatgaaacactacggcctgcttggattttacctgaccgagcatctggggactaagaactgcaaatcggaggaggagaaaaacactctagttgctgcccacttagctgcccagcgcatcctggacaatggtttgtcgctgcgtgttgagcaatttacttttcatgcattctaacataacctaccaggccctatttccgaaatccctgtcattgcagccgataacgtggaaggaatcaccaaggacgccaggaccagcaagtcgccacagagctctggcacatccaactcacaccatatcgacaagctcatccaggtgtaccagaaggccaaggctgactactacatccttgaagtcaccgagagccaccgcgagcgaaccaacagcgttcgattcctccgtgacacggccgaaaacctcctgcgatacctgaagtcagtcaaccaaggccacgatctgatccccgagatcgagggtatcattcgggtcagccaagctcatgcaaacgaacttgccggcggccgcaagcgcaagtttgagcacgtagacaacgactccaggggcagcccaagcctcagcccctaccgaccctacggattccacagagaccagcgcagaggacacaaacgtcgtgaccgatatgtccctgacagtgtcacatgggaatacagccatgttgaccggcgagctggacgagatagccgtgcccttgactcctaccgtccttcttaagctcactgttctgagctgaccgaacgatacgttctgaattatggggtaaccattttcttcgctaccgcttagggaaagtacaaacctgcatgtactagaaaaatcagtcccaaattgaatcaacaacccaatttcacaagcaagcgtcctcctccttgtagaatagttgacctcgggacagtcgaagtatgaaatcctaagctatgcgctaagccattctcatcttagcgttgtttacaagcccacgtgcacagatgacataatccctcccagaaggggcctggggatcccgatgatcaacactggtcacccggtctcgcgaattgaggggaaacctgttgtattccttcatttcggttcagggaaggggtaatctctgacccaatggagactacctcactgatcaggctcttagaacgaccccaaaaagtctctcccctgagaaatggcagaccttcatccctccgccgcggggaataatgcatcttccactagctccagcacatcctcaaacccacgattcactccagtttcttatacctcagacgaagaaaacccagtgccagggactgcagaatcacccgtaggctcattgcgactgcagaccaacttcgatgaccaccaagacgttggcgaccctctatccgatttcgagaacgacggcaactataacacaagtgaggaacgagagggcaagattccacgcggcggcttgggtccgagatatacaccggaggaggagagcgaggtagtgaggagatttgaccgaaggctcgtcccgtttctggcacttctctacttgctctccttcttggaccgctccagtatgtttggttattccgcacagcgcagtgctctccctattgttacaagcatgtactgatcgggtatgcagacattggaaatgcaaagatagcaggactccaagacgatctacaactttcatcttcgcaatatgaatggctacttactgctttttacattacctacattctcttcgaatggatgacgctgatgtaccgtgttgttcccccgcatatttatatatccctatgtgtatgtggatggggactagtcgcatcatttcagtgtctagctacttcctttgggggcctggtcgttctccgggcattgcttggaatcaccgaggcggcttttggccccggtgttccgttttacctgtctttgttctatcgcagacatgagctggctttccgcaatggattgtttatctcagcggcaccgctcgcaacatcttttgcgagtagtttggcctacttgattgtcaggttcagcagtgacggcccgatctcaccgtggcgaactctcttcctcgtggaggggttcccgagtgtaattgttgcggtatttgcttggtttctgattccggactctcctggtcgggctcgattcctgagtcgccgacaaagggtggtagctcagcagcgtctcgaagagagcaaaaccgactataagcaatcgtatgggagtcaatttaactggcgagaaatcctgaaaactgcagcggaccccaaggcttatattgctgccgtgagtctttatctatatttgagattgtacaaagggttttaacacatttactacagtttatgtttttcagttgcaacgttgctttcagctcaatgcctgtctttttgcctactatcatcaaagagtatgcccgtcgccagcatctattcacaatctcaacagccagcttacatctcttatagtatgggatactcctccttacaagcccaagccctctcagcacctccctatctcgttgcctttgttgtagtcctcctcactgcatacgcctcagatcgcagccgctcccgaagcccatacctaatagcgcacgctcttatctcctcactcgcttacttagcgatcgcagcaactggttatttccactccgggctgtcaccatggcttcacacattcatccgctacatctgcgtctaccccccccccgcgggggggtttttccccatcaccctcctcattttaatgnnnnnnnnnnnnnnnnnnnnnnnnnnnnnnnnnnnnnnnccccccacctccggcttctccccccccgcggcggggttcttttccgcaatcaccatcatcattacatgggcaatggataaccgtgtcgaaaaggaaggcaagggcgcaagcattgccattctcaatatcatcggacaatgtggacccctgctcgggacgagactgtatcccgagactgacgggccgtggtatattcggggcatggctacatgttcgtttttcatgtttgttgttgctatattggcggtggtactgcgggttcttctacagaggatgaatcgggcggttgcggaaacgacctataatattgcacaggctggccctgttgatcagggtgaggagcgggatgtgctcatgggaggtgggaggagggatgatttggagaattccactggggatagaaggcttgtatatatcatatagtcgatacaataatgaccacttgaggtttctctgctttggtgaggtgatctctgtagaatgttcttattagactgccggtctagaatccctttggggatgaaaggaattggaagagcacgatgtgaatcacaaagagataaaagtaaggaatatgattaaggcgacgagtgcatagtcgctatatgtggtgcgtatgtaaagtctatatgatatgtacatgtgtacactcaagggtgtgtatttcaggtttcttggaatcaaagaagcgcagcgaagggcgaatcggcaacctgcgactccttccagccaatacacttccagcagctcaacaaacctctggggtcgtatttcctcttaattctcaacaatttcgcgtagttatcaccccaccacgcctcgatccaatcaattgtgaacgggttggcctcgttgctgtacgcaccactgccaggagtaataccctcaataatggccgtcatgttttgaattgattggatcttctgtttccgggtgggaagggtagcgttccagtcccaggtagcaccggatcccagctcccaaatagcctcccgccaggcgggagaagcgctggtcgatccttcggtgtagttgtacaacactggtccgacgacggggatataaggtgtctggcccagtgattggatgactgcgaagtaatccatgaggttctgacggccctcaacggtgttgaagatggagcgggggatcagtcggcttccggggaagcgagtgacgccgacagcgacggagctggtcttgacgtatttctcgtaaaaggggtaccaagaagtgaactcctcgatggtggcggagccgccatttgctttggcataggcgatcacgcttgccagagagacctcggcctcctcgacggagaggaaaggagagatgttgacgagggtgttaccggtgatgtggccgccccatccctcctgtccccatttgagggtgttgttgacaacgatctccatgaatggaagcatgttagtggagttgctggtgaacttgatgttggcagcgacaaagcggatagcaggttcgacatggtgagtgctttcgaggaccacgccgaaggttccaccgccgccaccgcgaagggcccagaagaggtcgcggttctggaattcgttggcggtgcggtagacaccgtctggagtgacgatcttgaactcgaggacacggtcaacgccgagaccgtacacggggctcaagatggaatggccgccgttttggatccagccgcccgagacaccgacggtgggtgagtagccgccgagtatggttacgttttttgtctgtgcaaattcgtaaacctcgtcgaaattgactccagcgccgacggtgatggcttgatatctgcgagaggtgttcttagagccgcgtggagcgaagtccgcactgtactgcatagatttcaggtttcgcgtccaaagggatagcgtgtcacgcccactgctgcgagtgaggtaatcatggccactatttttgatgacgagcttcttgccggagcagttggagaacttgaaggcttcaatcacatccttggcactctgcacctcaagatagtgagagggtagattaccctgacgacaggtggtattcacaaatgctagggggtccgtcggatcgctgctgtcgaggaggcactgatcactagggtcggatgcccacatctcatcctggttgttcatgtagccattaggagaatttgttcgcatcaatggatccgagtagttggcctggatagtagcacaggcggcattgtcgcgagccactggtttcccattgtagttggagaagcagggcaaggagaaaggagtgagaagctggaggcgccctgcaacagttgcattgaagtcattcaaagtgcagtgctttgcaacagtcgagcttactaaggccaataggaccaggccggaggacttggccaacatcattgacgattgcagaagaaaggatgaaaatcacgacacagaaaaagtataactcagacagaagaaccagctgaggagaaaaggtgtcttacttgtaactaagaatttaacctatttcggcaaaagatcaccgcaatatctgcacgatctatataattggctggcccttatattaatcaatcttaagatactatcctgcagactccaaagcttgaagaccggcaaggaatattgtatttccaccggaaatcccactaattattccacttattattcccttcagaaagtgaatcgtccaatggtgacatctagctctccacacaagtcgaactagttccaatcagatgccggtgaaacctcgtataaatcggccctctacaacatagggaatgaagcgtatcatctatattaaattgcctgattattcgaaacccaagagattattttcgtatctagatatgtatacatactgactacatgtagcagagagagtcaattaattccttgttggttaccgctgtaaaatgaaaacacgtaatttatttaaggtggggtccaccatccctgatcgggactagcctacagtcaactgccggtcggtgggtcctgcatgtatgaaaatggaaatgtccggaaaatgtcgatcctcccccctgttcgtctaagctccccaatcactcggttctcggttctcggttctcacgaagttttgattttttctatcttcccaccatgtcaatatggagcaccaggtgaatgtctattggaaaaacgtcctcacgattgtgccaattgttggggcgggcgtggttactattacctacctgttacgtctatactgcaggcgggtgaaaagggtggggctgttgctggaggattatctaatgggcgctggtctgatcctctcctactgtgtcacagcttttgtagtagatagtgagtattcctccccatgaatctatcatactaactatactaactattaaagccgccttcaatggcgtcgggctacccatcacatcgcttcccaaatatgaacggatgcgtattcaattcgtatgttatagcttataccgtggtaatggaaagatctaacagcattccgcagggatcatggatgatacagaagttctgggccccgtcaatggcttttgtcaagatctcgattgtcatctttattaaacgactattcggctcgatacgtgcatacgtcattatcaccaattgtctcgttgcatttatcgccacatgggctctcgctgccctgttgaccaataccttccaatgcacaccggtgcaatactactacgataaggatttggacggacattgcatgcccgggcaggttcaattcttccaggccatgggatcgatcgcattggttgaagatgttatcattctctgtctgccaattcccgtattttggaggttacagatcaaccgtcggcagaaaatagcattaatcctggtgttttctctgggtggactgtgcgtgactccctccttccaaatgataattcctttccttctaatgatatattgcagtgtctgtatcttcagtctgatgcgcctgattgaattccgcaaattccagctcaccgaccttgcgggtgcgttcctatccccagctcgtacgatgattccaactaacatcatccagcctcaagcgccaaagaatccatctggacttgcctggaactcgacgtcgcgatcatttgtggctgtctgccgtttcttaacccacttgtgcaaggcgtccgcaacaaagtcagaagtgacgcctcaaaatatcaatcccaaccttctgccggatccaacctgcatttacactcgatgcggggaaacaaaggcgattttcgagagcttgatagtgattgtggagcatcagcgaactcaatcagtcgtaatgctacgacaagtcggcagagctcggatatggagaataataggcaggatgtggatggacggtccaacaatatcaggccttcatgatttttattcttaataatacgtatttcaattccccaatacatagtttcaatacttctagatatctcttacttcagaactctctcactttagatatttctcaatttagtatctcgttgtagtatcccatccttcacaactcattcttaagcccacatggccttgaacttgttatcaaactcggcgtgcagttctttgaaggccttggcaaccaagaacatggatcggtaagaattatccactggctcttgcgtatttttagagctgagcccgttgctcgcatctttggaagcattgatggcttcatcctcaatttcatcatcttcatcatccatctcatcctcccagctatcaatcacaaccttcttcgcccggggccgagaggtggggacgggggcagcagacgcctgcttgttgtctagtttgacgtccatctttccagcattttcagcctcaatctgatcaacggccttatcatccacgagattttcgtaatcgtcgcctccgccagcaacatcgagcatgtctgcaccgatattgcttccaggcttgaggaagccctcaatgctagtcttaatggtagccagagtcaatgagaagtcgttcagcacaaaccagatgtctccgcgacggatgcggtttgcagtctccaactgagaaacatttccgtgcttgaagaagtcatacaggtatgcattgagagggatggcgttctcgttgggatcaacagccacatatggaatgacggaatcctcaatccaaacgccactgcgaaccatctgactgagttcgaagacagtactgcattggtctccgtttcctgaaagggcgaagaatggtgatatgattgatggggagatgtggtcaaactgcgagaacccgagttgctcgcaggaactttctccaccgcacttgatcccactgaatggtagcgaacagtctggttccttgatatgctgctcgacaaaagtggagaaatagccagtgtagacatctaggacctgtctgttgtgagcacgtagggcggaggctgcttttctcggtaaaggtggaagagccacgatcgaggaaggcttcttttccgcgttttggaaccgttccaaggtggactctcgcaggggaatacgcccgaaaaggtgggccatgaccagcatcagagtttcaagagtcttttttggctttgtctctatgtcctgacagagatcttggaggtatcccgaattcagtagggcatggaaagcaaaactagaattctctgtgtagtacagatgagagatacagcccgcaaaattcacagccatacctgtactgctaagaagattgtttcgtcggaggtattcgatagagaatcggagatggtggagcaccgtctgcttcatctcagggccaccgaggtgaatgcgagaacttgagaggatcgaattgattgatttcacggcagacggagcttgctttgatccatatagcaagatgaacaaccgtagaaccaagcttgtcgtaatggggaaatgtccactgagacttgggagtctcgaactcatcagtcgttgcaccttggatggtgggacctgctggaaaacaacatttcccaggacatcgaatccacggcgacctgctcttccggcggcttggcggaaattcagggctgtcaagaaaatggaatcgcctgaaaaaacgactgtcttacaaggcatgttgatacccaaagccaaagttccagttgcaataacgacacgtaaaaagcctttcctaaagaggatctcacaaacttgacggtacttgcgattcataccagcatggtggacaccaattcctcgctctagggcatctatcaaccattgaggcaccgagcgccactgcaactgcttggaataaacaaggaactcggaagcgggtactttcttgaagtcagccaaatggaatccatccacaggcctcttcggatcaaagagatcaagccagccgaaatcggtagatgctgattctttggcttgctctgccttggaaattggctcttcgtcagcgtttccacttgttttcttcttggtagccctttcaagcttcttctttgctgacagcttggatgtcttccatacttcccatttggcaatcttggatttccataccggactctcttctttccattttgtctcggcattttgtagctgtgtcaacagcgattggcatatatcttcacatctaccgcggtcataattgaagaatagcgcggggagggcattctgagcgtgtaacgaggcgatcaaagggagggttgtgtcgaccaggttcccgtgtagggtgccagataggccattcatccgagacacctgtttcgataagtccttttctttctcgactacaaaccctgttgggtgttcgagatggagtaaaagtgtctcaaatggagattcccggtctttcatccactcccctaacaactttttcagttgtccctgccactctatgacatgtactttttggatgacagtattcgagaaaaagatggatggatccagagatggatcaacagggaactgctttgtttgaaggtccttcattgctttccagagggtgaagcagtcacgtggctcaaagtcaagatcatctggtatcgatctggtgcggtccaaaaggctagtgacaggatgaacgaacgtcatatcatctgctccatcgaggcccaaacgggccaagctaggagtgctggaaaaccctttgaacgagaagtcaccatggggctggtacacgtacttccgcaagtccgaataacggtggtgatgctggatcattttgaggtcaaatccattgcttctctgggcaaaatcaagccagttgtagaattcctggggatttccgacggtagccgagagtgctataattgggcatggggacatcagaagcagttgttcccaaacgacaccatcatcggcctggccaatgcaatgaatctcatcaaaaatgatacgcctcaagcggggagtccatgcattggcgttcgagggattaagcagcatgatctgaagaatctggggcaccgtgatgagaatttggcatccctgaggattattgatgcggtagtctcttgtgtggatggcccaaaccgatttcccgctggttttggctgggaaggttttggaaaatcgggcttggacctcagctgcgatctgattgacaagagcttttgtgggggcaacataaacaagaattccatcgttatcttctttcaaaatctgtctcatcgcatagaagctgacgaatattagcataactctcaatcaggaaaaattgcgacttacgaaataaatgtttttcctgcactcgttggggccacgatgaatgcgctcttctttgcatcgatctggtccagaacttcacgctgccagcggtcgggcgcaaaatcaggcgtccgggagtcgggcaatgagtctatgctgcgctccatgaaaggcccaccatgtagaagctggaattcaactgggctcatctcaatactcatgctgggtgctgctttaggaattttgaacgccgggaaagatagtttctgttcactatcggcatgaagctgggcagctggcaaaccaagtacttcacagacagtcgagacatatgcgacaatatcggatgagataccctgcttgattttcacaagagaagtgacgatctcccaaatgcgtgtcacgatcaacatatgctttttattctgcggatttatgcgttcgaaaaagagaaggcgtagcaatgtatcaatcatgcaagtcagaatttcgggctccagaacctgtcgactgtctttaggtagactagttaagtatccgttgagcttcgtaaaacgagtcacaagatcatcgatgagagaaaattcgtcattgtacacgtttttccacttctgtctctgtttttgagtgacttccattgctttttgatgaacgaaagctgcggccatctctttggtggatggtttaccagatttggagtgagatttcttgtctgatttcgaggtcgtcgggtgggttccaacgtctctgcttgccgaaggagtttggtgagacttctgacgtgaactactggaagattcgacaacaatcggctctggttgtgatccagagagacttgcagcataatctctcatctcggccataaaacgctggtttcgtttgtggtttcgctcaacctcttggggggttaggatgactttcttttgatcaaggggcctggagctatgccagtggctatcttctttgaactccttgaaaacttgcgaatcactcttcgcatcggcagattcatcgactacgagctggacaggctccagaattttatcgaagactgcattgctaaatggaagcaccttttcaaagccatgataaggcttagagataattccgtgagtggtatgttccaagggagcgggagctcccccaatcgcttcacattgcagtgttgttccacaaatgcggtccaccagagacgcaagagtgttgaacggggattgtgtggccgatgaaattactgtttggatgccgagtttctcgaccatccactggactccgaagaacaatgttccgtccacgaggtcagacaggtcgcaaggtaggctatggtcgctcatttctttctcccaaagcttcgagctgagcaaagcattcgcggttttcacgaattcattgaaaaacttcaagtttttgggtacagttgttgtttggattgatcgatccgacagttgcgtgttttgtaaaagtacaatgtgcaaaagcatagactgtgctccaatcttattttcgaggctatccgtcacgctacccaaaagcatggagctaagcgtagcaaccaccagacattggcgctgcgacagctcgggcttctcaagaagtgcctgttgaagaaagttatctgtttgagcctggtttgacgattcgtttttgatggaatcgtagtccagcgcatcctccgcttggtcttggctgtcctcaatatccaattgggagagggaattccacaattgatcgggatcgtctgtttcagggccagtcgataagggattcgtttttatggagctttcaatcaccattgccatgacctgcgtatattgtgagtacagagcttggtcttctgcagctgaaaagacctaccttggtgtcacggaactcaagactattgatgagagcaatgttgtatccgtggacaacgaaccagtagatcatcgcgcggagcttgaaccttgagatctcgcctcgcttatcgacaaaagaacctttctggtcaccatcttcgagatcgctgctgtcagaatcactttcagaatcgctgctgtcgatatcactagcaatatcatccttgttttgctcggaagaagcaccatcgtgacacatgaacaaataggcccccgaacttatcagatgagctttaaactcatcggactggaagttatcaaacctcagaacctggaagtatcgcgatggttggacgcgaatagacacaagatgctgtatgatcgcctctcgggcaaggaggtacctcgcgtggaggtctctgtgagctcccttgggaatgcataatgaggcattctcggcgaaaaagacaatctcgaagaaacacttgcgctgttgaagcttttgtaacaacttctcggcaaggtaagtcgcatgcaagacctggaaaccagggttgaaatcaagtttgtcgttggaaaagcattcgagcagaagcgaatctccttcgattatgaaaagctcgtcaccaacaaagtcaccgacgaggtcaacgacccgagagtctaggttattgtacctttgtttaatcattagtaaaatcgagcgaagtccgaaagctgcaaagccagtgctcaccaatctagcacaacatggcgatccattatcttctcaatatttgcgggggtcgcctagatggctggatataaattagtagtgtcaagaccggaggatcggcattttgagcgacgaacaggatgaaccaggtaagctaagctagagcaagggaaacaatgtgtggcacaaagaaggagaagatggtaaaatagaaatttgggatggccttcagggaaaatatgaaatgcaaacgttcagaaggaggggcattaaacaggatatattgggaatgtgttgggcatgtgctcagtcgactcaagatccaacaaaccgcttacctatgatattcagtgtgatggggctctgactcattgcctctaatactctttttggcggcgtaaagacagtatctagaatagttgggctcttgatttctttgggtttacaattgtgaagggattttgggcagaaaagccaatgaccgccttctccagtatacgatgtacggcagtatacaacatccaggatagatcaagagcagacatccgatatttgatatttgtgaaatgtcgaaagccatagcatgggccaagatattgtatattcttgtagcattttcgggggcttggcaatggactccgattttgttccgactgggtaactcaaaagcccacggaatgcttcaacggctagttggaagcgtaatgcattttattttcctacttgatatgatttgataaatatttcgagacatccaaaggctccaagttccacaaaaaattatgggcagttataagtcacaagtcaagggatatgtgtgatatttctgttaataaagaaataagcaacgcattccttctctcctgcggctggttttcatggagatccccgacagacacatgacctcatctcgcggcaatggattaactgaattcgatttggctttgcgaagaccaccacgaacaaatagtgcaaagaaatgagaggggaaaaacgatacacgcaatgtccagactcccatcaaccgtcccaatcacccaattcccttgggaataaacgccaattcctcgctaggaaggtactcgtaaacgaagcacacaaaaaaaaaaagacctgttaggaatgggccgcttgggaacattatagcataccggcgaaacccacattcgtctcgtgtccgaagccgctgcgaaggctgccgaaatctagtttcatgagcagacgatctacccccgctgctttatggggcacgtaatgactgaacccggggctcgtgctgtcatcaacgtgccgggaaccaggccacatatgaccgaagttcgttgctagttccacgggtcctttgccttctcccgagcgactatcgtcaatgtcccgcagggtcccaacgagattcttaatacccgtctcgacatcgtttcgagtggtacgtaactcttcccatacatcgcgttcttcctgggcataatccaccaacgcgtcttccacgccttcatctgtttctagatccatgttgcgttggatggtttccaaccggatcacaagggcgacgaagcggtcgatatttgtgagtagtcctctcatggtgtttgtgaagggtagttcagtcaaaaagagggactggaccagcgatgacaagtgccgccggtgtgcaaccgtgagagcctcgggatcgtgccgtcccatggtctgttggccagactcggggaagtctctggtcggaatctggttaggagacactgtcttggaactatgctgcgatttagaagaggatgcggttccaggtcgggacccaggggctgatgctgtagatgaagagcttccttcaatccattggcgaaggtgctgccacgactcattgacaacatctccttggaaaaagccaccgatctcggaaagcataaatagacatgcacttcctgtggcccagatatgacgcatttggcgaacacgggcattatctctatctcttcttgcctttagctttgcttggccaaagatactgttgcttctgggcggtccccatggcgtagggtagtttcgccgcaacggagttcgtttccaaagatccccaagccggatttgagcccgccgtattcccaggagataagaatgaatcttagaatatatgacaatatcagagctcgagatgaacaggtctagaggagctcggatatgtgaagtgagggttgtcggcgtggggaagagcaggtcttcaaatgagacctttgagattttggataataagttgggagtttgggcaggcgtcatcggtcggccacttttgcggccactgatggacagagaaagaaggtcccgggcaagttcaagttcttcgtcggccgggtcctcctccttttccagcgagaaaagctctgcccatgcttcagctagagcagctgtgacatcaccttctttgacggtaaggacgtcaggttttcccaaaggacgagtcgctgatgggcctcggcgtcggctttcctcaatgcgggaatctgcatgtgctacaagagctaccgcaaactcccctcgtcctagtaaaaggaaattgtgaagcaaagtaagaatttctagaatttttgggaggggcaacaatttcgacaaggttgattgagaaagggaaaggcgaatggagtcaacggcggtagtcagttttgaaggcgaaattggtgatttcaggcctgcaagttgctcgatgtgctcccgatataacgtaaccggcgcagtagaggttcctgctattgaggttttccgtttcgcccggatatgattgagagatttaccaatgaatagtattgagcctgctgtttgtgctgtgacaaaatttgggagcaatcggacgtttatgctgaattgtgcctcgtcattctccttttcggtatcctcttggataaaaaagtcctccttcccgtagatgggaagattcccataaagtaaccacatcgaaagctgtttcatccatgctgtctcagccgttgtcgctaattgcagggccatgtctttgatatcgagatatcctgtttgagcttcggtccgcaggtgatctatgagcgctgcccccgtggagccatgcaaaggttcggtgtttttcctttctggttgaatgaaccggataatagtccagagccattccatgcgccgcgtccatggtgcgaactctcccacgatagtcgacaatgggacaataccataccctccgacatatccgctgtcctcggcaaggattgccctctcaacctccaggatcttcttctggaattcacctagatgcgttccaataacagctgtggagactgagcggcatataactgatggactcgcagaggatatatcggaggcatatttccgcagctgcgcgtggagtcggcttagatggacaacggaggcgaggagagctttctccggaggtgaaagaaggggaaagtcatcttgagcgacagaattctccttcctttgtgtacggaagaggagggatggctggccggagagggagagtaggatctcatggagcattctgacgagagttccctatcggatccatatcaatcacgagctcatcacaggcgtatatgcagataactcacctagggaaattccttctctccgttggaccgttcttacgctgccagtataatagaccgcgccccacgaattcaaagcgacacatatgataaagcgtttgacgacgccaagcttcgcgttgacgccgaggcgcgtcaaacgtgacgtgtgaaatagtaggcttcagaaccaatcggagaagatagaggtggttttcattctccagagtcgaccccaatattatctagatatcacagcttccaactctcaacaagacactctgtgactcgagaacagtagctcccatggaagaatcgcggggcctaaaggccaatcgtcgtctcaccgcccgttagtcatctcttagctgtcggcccctcttacgtcggtccctctctcgatctctctcatactctttactgacttgtcctttacttattcgcacctcctaccttacacagtgttccattttctcttttctttcataaacctctatcgtccgtcgattgcgctcggattttgctactcttctacgtgctcgttgagctaggtacctggtacgctaggcgttgcaacttgatttatcatcactattgaaagacttgctctatcgcaaggctttcacctcctgactttcatcattccttcaaacattcctgttcgagacgcggctaagcccggaaagcgcagagcctctgaacacgacgtcgtcggagctcggccagagaaaagaaccatgacggtatgattagtcttgatcttagagataagattgccactaatatatcttaccaaaggacattaaaatgcaggtcgagaacccccaagaaaccatcgaagctatcaagcatggggagatcgacgaatcattgtatagtcgacagctgtaagccccccgcatccctcttatgacatacagatcccgagtatgtgctgacaccttagagatacgttcttggtcacgaagccatgaagcgcatgggatcttccaatgttctgattgtaggtctcaagggcttgggcgtggaaatcggtatgtgattcaactattaatcaagcctcgatttcatcccgacgtctgattgtctccatagccaagaacatcgccctcgccggtgtcaaatccctcaccctatacgaccccgcagcagtcgctatctcggatctttcttcgcagtttttccttcagccagaggacgtcggcaagccccgtgctgaagttaccgccccgagagtcgccgagttgaactcctacgttcccgttacagtccatgagggccagagcctcgtgggcgatctcgaacgactaaagcactaccaggcagtggtgctcacacagacacctttgaaggagcaactggtgattgctgacttctgccacaagaacaacatctaccttacaattacagacacattcggtctctttggttatatcttcaatgactttggaaagaacttcactgtgggtgatcccaccggtgaagagcctgctggtggaattgtggcggctatcaatgaagaagggttggtttcggcgctcgatgagacaaggcatggactcgaggatggtgactttgtcactttcactgaagtcaagggcatggatggcttaaacaacagtgatcctcgcaaagttactgtgaaaggtccctatactttcaccattggtgacgtgtctggtctaggatcctacgagggtggtggtctattcgctcaggtcaagatgcccaagttcattgatttccagccactagaggatcaacttaaaaagcccgagcttctcatgtccgactatgccaagtttgaccggccacaacaattgcacattggtatccaggctcttcataagttcgcggagactcatgatggccaattacctcatccccacaatgatagcgacgcccaggaggttctgaagatcgctaacgatcttgctgctactgatgaggaaaaagtcgaactggatgagaagataataaaggagctgagctaccaggcccgcggtgacctgaacccattggcagctttcttcggtggtatcgccgcccaggaagttctgaaggctgtctccggcaagttcagtcctattcatcagtggttgtactttgactctttggagtctttgccctcatcagtcactcgatctgaagaaagctgcaagcctcttggtacccgctacgatgggcaaattgcggtgtttggcaaggaataccaagacaaacttgccaatgtcaccgaatttttggtcggttctggtgctatcggttgtgagacgctgaagaattgggctatgatgggtctgggtacgggtccgaaaggaaagctttacgtcaccgacatggaccagattgagaagagcaatcttaaccggcaattcctcttccgtaccaaggacgtcggcagactcaagagtgaatgcgcgtctgcggccgctcaagcaatgaaccgagaattgaaagacaagattgtcactcttcgtgatcgcgtcggtgccgacactgaacatgtattcaatgaggatttctggaacggccttgatggtgtgacaaacgctttagacaacgtcgatgcacggacatatgttgatcgccgctgtgtcttcttccgcaagccattgctggagagtggtaccctgggcaccaagtgtaacactcaggtcgttcttcctttcatcacggagtcctactctagctcccaggatcccccggagaagtcattccctatgtgtactctgaagagcttcccgaaccgcattgagcacaccattgcatgggcacgggatgtcttccaaacctacttcgttggtccccctgaatcagtcaacatgtacctctctcaacccgactacattcagcagaccctcaagcaagcgggtaatgagaagcaaaccttggagcacttgcgtgacttcttggtcactgaaaaacctctaactttcgatgattgtattgtgtgggctcgccaacaatttgaagcgcagtacaataacgcgatccagcagcttctctacaacttcccccgagattccaagacatcatccggtcaactattctggtctggacctaagcgcgcccctacacccttgaagttcgacagcactaatccaactcatcttggatttgttattgccggtgctaacctccatgcgttcaactacggcatcaagaaccccggtgcggacaaggactattaccgcagggtagttgatgacatgattgttcccgagttcactcccagctcgaatgtcaagattcaggccaatgaaaacgaccctgatccgaatgcgcagccagctggtttgtccaatgacgaggaggaaatccagaaattggtcgcatctcttccctcgcccaagtctcttgctggtttccgcttgcagccagttgagtttgagaaggatgatgacaccaatcaccacatcgacttcatcaccgcggctagcaacctccgtgcagacaactacgagatccctcaggcggaccgacacaagaccaaatttatcgctggaaagatcatcccggcgattgccacaactactgccctagccaccggtcttattggcctcgaactgtacaagattgttgacggcaaggacgacatcgagcagtacaagaacggctttgttaatttggcccttccgttctttagcttcagtgagccgattggtagcgaaaagggcaagtatcaaggcaagcaaggcgaggtcacaattgacaagctctgggaccgattcgaggtggaagacatccagcttcaggagttcctcgacttcttcgccgagaagggtttggacatcaccatggtcagctctggagtcagcttgttgtatgcaagcttctatcccccatcgaaggtcaaggatcgccttcctctaccgtgagtatcttctcttctatagctagccccatgcgtgagttagattactgacattgtaccttgcagtatgagcaagcttgtggagcacgtcagtaagaagccagtccccgagcatcagaagaatataatcttcgaggtgaccgccgaggaccagacagaagaggatgtcgaggttccctacgtgatggtcaagctcacaaaataaggcgattagaatctacgaaaagccggttggctgcatattgctagtacaataggtagatttcatgactattccactctccacagactctatatgagtacaaatatgtgtagaatgaccagtgtaaaccacctgtgtacaaatcaatatcaaatcgctcaaggctgtgccaagaccatccagatcgctttgtcaaagctgatcgatcttccgataagcaaatctgactcagcatttggtcatgcccggggacgtcatgaccccgcgaagacgacatttgtattctttctatatataagagtgaattccactgtgtctgccgcttatgttctttactcttctgagatcccaaccattgaagtgtattctacgcgcagggcctcttcgtacagttcaccatagctttgtgttccccacagtaccaatcatctactcccgcaatatggctgtaagaaacacaaaacacggccacaacagctctcttggctacgctaacttatatttcaagaccgtaaattccatgaaaatcaccgattgggtgaaacccggcgacaagtcgggcgagttcaagcgtcagcaatccatctttcggaactggatctctagggaggctggagcccaattccctccagagaagggccggtaccatctttatgtctcttatgcctgtccttggggtatgaaagaacttccaattgactggccactcgatcggtgactaattatctactagctcaccggactctaattactcggaagctcaagggcctcgaggacatcatctccttcacttcggtgcattggcatcttggggcagaaggtcaaatttatctcatgagttgtggggaaatagcattgttctaactcatatcttaggttggcgatttgctactcccgatgagaaactgcccggggagaacactattcccgatcctctacacccagacttcacccatatccgacaagtctatttctccaatgatccagactactcgggccggttcaccgtcccagttctcttcgacaagaagaccaagctgatcgtaagcaacgaggtatgaaacaatcttcccaaagaagacatttccaatttcatattcttacaaaaccagagctccgaaatcatccgcatgctttaccatgaattcgacgatcttctcccagaggaatacaagaaaatcgacctcttccccaaggctctacaagccgagatcgaagcctccaacgactggatctacaacgacatcaataatggcgtttacaaatctggcttcgcgaccacgcaagaagcatacgagaaagccgtaacaacactcttctcctcgctagacaaggtcgaagatcacctcgctaagcagcaagcagcctcgaagccgtatttcttcggcgacaagatcaccgaggctgatatcagactctacaccaccatcgttcggttcgacccagtctacgtgcagcatttcaagtgcaatctgcgtgatatccgctccggattccccgctattcaccgctgggtgcgcaagctgtattgggagatccctgctttccgggatacgacggacttcgagcatatcaagttccattatactaaaagtcacaagcagattaatcaatttgctatcacacctctggggcctgtgccggatatccttcctcaggatgaggaggttagggctgtgcaggcggctgaataagggtttggcctcggaaagggtgcttcagcgattatgcccgtttgcgactcgcgaactgaacaatctaagagcaatctgagtgttatctcaaagtatgtatttgtccaaacgtgcagatttccttgtaatagtaaaaaaaaatggggaatctaaaagtcccgtggtattatatcgacgccttgccatgctgatgtggttgatggtgagtttcccaatgcccctgtatcaaagtttggtcaaaagtacagttgtctcaagtgagcgcaacataagcaataaagtaataaaagttacaatgaaaccttgttgatatatgcagaaaaaagtcaaatatcgtgatcgatgatcgttgatatggcaaagagatcaagaatgagaatgggatgcatttcagatgcacccatgagccagggggtggatgtgccatgcctttcaatggcttgtgttgtgggtatattgggacaacgcttctaaatttcaatccagtaaatagcaaagatcaatccgaaggcaccggaatgaatgcgaagatcgagaatccacgcaaatggctaggtgatgtccacggggatatgcaaggaggaagaggaagtgagggcttgttggggctggcagatcatcgtaggccgagaatgcgtttcgcgttctcgtagaccacgtagctgattgacatggccggtgccactttgagaagattaggtgtgagacctttgtaaagaccacggggtccctctgctttgagtgtgacgcttaggacttcaccaatccctgtgtatgtaggcggatgcaaaatcgtgccttgagtttgaagtcgagtgcggagaacattgagtgggtagacaatcgaggcgctgaatcctccactcatagcaccaattgcacctgtcgcgaagttgccgaggggaacgtcatcctcatggcagccacagtcacgagcctttttagctatgagtgctcgtttgaggtattcaaatgtcgatagatcgattgcggcgtaggggaacatccccacaaggccaagcggtagtcctcggaagaagccagccaagccattcttattccatacctttcttgcggtagctgcgatgagttgattgcctttcgggccacctttcacggtttcgcattgcatgcgactattgataactatgagccacaatgctctcacaactcactttggtcgatgtactcacaattttagggtatcgagggggtaaacaaaacatctagtcacaatcagaaccgacttgcctttcatagataacgcgcaagacctactgggcaaccattccaccaaagccacccgacatgaactgtgaagtgggacgaagtcgcttgggatcattgtgtccttcgagttgtgcaaatgctcgtttcgcagactgttctctggtcagtattcgtctagttgtgtaggcgaaatcgaatagcaagattacaaacctcataggcaccaaacttgatcgcagactctggcataacctttaccacgttcaagccattgcctacttatagttagtcgctgccacttcgagtccaggttgacaatatgacaaacctgcgaacaaactccgtattcctccagcccgccatagttccttgagagcgccgaacaatgttctgggatcgttccccaccgcagtcaacagggatccgtccttcgccgcctgaaccgttgatttgacgctagtctgcgcaatgagatagattttgagacgatcgaggggggcggtggccgtccttgacacggcacccgccattccacctgcaaggaagtagcctaattgaggggtattttcggtcaacttccgtccatgatatcggaaagacatccgcatggcggtagtctggggaagaggcagccattccaaatccaagtcggcgtctagcgagacaaattcatgctcgagaacgggttccggttttgagatctggctggtttgtgcgtgtgctgaaggaaggaagggggccaaggcggggagggacaaaaagttgtacaaaacgtgttggatggccggaatacaagatgaaagaaacggatgatttgtacctaaaccctgcaggtcattgatgttgacatctccttccgggtttagattgcccgtggccgtatagtatgaaaggactgcgcgtaggtcggtcggggattggagagggaggaatagaaggaaatccctaaaaaaaagagaagggtaaatttgttagcctaggatttttcagccttcattgaccagagtgaggatgcgtatacctccactcagtgtaagagatcacgccgtcatggttcttatcgacttccgcgaaaaaccggtccaacttggcgctcgagactgtgaccccggaacgtgaaaaggcattccgcaattccatcttgtcgatttctccgtttttatttcgatcaatgctctggaacatctgccatagtccgtcctcggtgcggttgatgaatgctcggaattctagtggtgattaggattggaccaaatcttggccagggcaccccttcgccgagtgatccctaggtggttctcgtgagcttaccggcttggtcgatacgtccatcaccattcgtatccacctcccgcgcgaccctgagtaccatatcgtctgcattttttagagctagaaagagattagacaagcgcagatatatagcaagaaaccaggtccaactcacgatgatcaattttctttaaccccttctttaacccattcaggtcgatatggccctctcgtcgagtgtccaaggtttcccagagtttggcgactcgtttgtcgcgttcatcttttgactctccggatgccatgataaaaaaaattgttaccgagcaaccattattttctttgatacttcgttataagaagtctttcgagcacccaagacccctagaagttgaggggaagaagatcgaggggaacataaaagtatgacgtgaggtaaaaggtatgcccagccctggaggtgaacatggacgggtaaatgcccaggtgattaatagacgcccggcgatttgaccggctttgacgccatcggattatcttgcacgggaccagggccaagccctactatccctttttgggattgcaacctgacctcatatgagatgagattctgatgttgttgctttgtttttctctgtttcttttctattggctctgcatcatctcatctcactttaatacgtgacctgggtcagcgggacttcggaccatgtcgtgacggcttccaatttacgagcgttgcactatcaaacattgaacttgcaatatggcagccaactactgggcatcatcccagcgtcgacactggctattctccagggagaagttagcagatatccgtgaaggattacgggagaaggataaagttgcccattcgcagttcccgctgccggatcagcgactattaaatatctactttaaccaacgtaagttttatcaatatggtcattgttttaaatgaatgtcgggctaattcaaatcataagagcttatcaagctcggaaaacgcatgtccaccagacagcaggccattgcgacagcacaagtgtatctgaagagattctataccaagaatgagattcgacagacaagtccataccttgtactcaccacagccttctatcttgcctgcaagatggaagaatgtccacagcatatccgctttgtggtcggcgaagcgcgcggtctgtggccaggtatgcatccgtatataaagccataaaaacagatcatatgctcactatatacagaattcattaccccggatgtggcaaagctcggagaatgcgagtttgccttaatatccgaattgagctcgcaactcatcgtacatcatccttatcggactttgtccgaacttcaaaccgaactatcactcacctcggatgaagtcgccctcgcctggtcggttatcaacgatcattatctgacagatttaccccttttacacccacctcatgtcattgctatcatggcaatcatcgtcgctgtcgtattcaagcccacccattcatccaactaccctggaaccgggcaatcggctttggcaggctctatgagagatggaggcggcatgcagatgctggccgctttgtcagataagactggatccggtcctcctcctaaaattcagaagcttgtcagctggcttgcagaaggcgaagtcgatattaaagctgtcatcgagtgtacacaagagctggtctccttgtacgaggtgtgggagcaatatagcgagaagaactgcaaagaattgcttgggcggatggtgaagagcaagaacttggacaaatgatcgtgtaccgcatcctgtactttacaaaacctttatataccggtatctcaatattcctaatctagttttgacggggtttttttcctttcgtggacatttgtcatttttcattctctctctacctagcagcatacgactggtaaaagcaacccgctttctttatattcggtaccccccgcatctcgtcttaggcaatcatgagacgaatccaaggatttcgacgcgatggtgttccaacagaaagcttgtatgagagaaaactggggggaatgcaaggaagtggtttaacaagaaacaatcagatgcttaattgggtctaatgtgtctactataaaagtattcaaacgacgatgataccaccgaggtccatcggattgcatagttcgagcagacggggattccgtctcatcgaagctaccagtgccaattgaaacccaagatacgggctttgatttaagaattaccaaatagactgtacagcgaagaagagaaagacgtgaagaagaggaaatggagggggggtttatactcgcaggtggggatgtcgtgccatcctcgcgcctgcccaatccatggacagcttcatggcagccatagatcaccatgattccggtacggcaaaatggcatatcacataggcatggccctaactccgtactggattcaaagttggatttgagatcttctaggcaaaggaagcggttattcggcgattgagacaagttgaacccttaagccaagaatgaggccctttgaatacctgcattccaaatatcgttttattacactctgagtaaagagattaaatgagtatagaaatgctaattacacacttaactagtcagttaggtgtagcattgtgacctgacaacctaagacatacatcttatcaacagggcgactccaaaggtctctagggctgcatggaagaatttctcaagagataaacttaatcgaaataagaggtttgtcttgctgtcatgctgtcattctgtcaggatggcatcgactccgcaaatctatttcaataccgcccagagtctgaaaccaccttccgactcggagcacagaaacattcgccacgatgcaatagatatcacatatttaaaatccaaccagggcactggaatagttgaagatcgtgtttgccagtcccttgcgcggtgtatatggggatcggctcgcaggaataactagtccctcaccgaattacatatttcatgcattcggaccccacgatctcacacagacaccaaatcatgcgccctgcatagacgctggatagatcagctgcatggttcaagcctcggggcaacgtttacggggtacaatatgtgatctatcctacacctcaagagatcctgttccaatagccagaagggcggtgaaaccgacaactggagagccagcttacggtggtacgttgtctctagtaaagatttttttcggcgccgtgtaatcgaattgaagttatcactggtggaagatgaaaggtcggcacatcgtgtcacagggttatgtcccagtaggcgccgagagagtgggcatatcccaatgagggacaaaggacgaaaatacatacaacgtaggtaagtgaatacggaaatagctcccagacctaaaatataccacacgttgaatagtggaaactcacagttgattttgattcggtcgcatgaatatgtagtgagtcacggataggcaatggtacccgaaagaaaacaagagaaggcgccttaagcctctgccctagtccggattccgcattgatgaaccccgatttgggaaggatgtgagctgataaggtaagatctcaaggtcctctgccaataataggcgggtttgtctgcagctggttctatgggtgtgtctcaagaccaacaaggtttttttttcgggtctttgcgctgcgtgtcgaaggattggggaatttgtacggggagccgatcccaagcaagatcagcagccactgccgattcggacaccctatagggggaatggagggggaatgtgcctgggaaggttaggtcttgccctgcacagcctgcagctaaggggacccgaagggctgacaaaaatttcagcttccccaaccaccccccgggttgaggaaccttgaacggaggatggggaatttacttttccggacagcttcactgcatattcgatgatacatcatctgtattttgtccaggtcggcagtttggcggtttcggcaaatgtcggatctagataaaagcaacaatcatcattgtcgtacggagtagggcaatgctagaggtctccagatgcgcttggtatgtacacaacgtagtggcgtcactaagagatcttcctaatcgggtaaggtcccaattgtcgacgtcacgtttttctttttcagtattttggtgggccgttggagactccacttggggacgatatgcgggctctcattggtccatgggctattgccactctggctagcgcttcgatctggttggtgcgtcgatgtaagtgccttttccgccatgacaataccaaacggtaattatccacattgtccacatcacacacgcagtccactcccttaaatagtaatggtaatgaccgtaaccataccatcccccccatagcacacccctcccctctttttcccttcgcctcttcccacacacttctcattctcattaatcctcctttcctcgttcaatctcatcgatctttcctatattttctatatttttctttttgtaactttcttcttatcttcaatcttctcactttcgagtgccggcttctcaatacaatgtctgcctacttctacaaccaacaccagcaacaccagcaacaccctcaccatggtgcccatatgcagtctgcgtcaaatacccaccatgggcgctctcgtcgtgccccaaagatggcctcgcaaaatcctcagcgtcagttccgaggagtcaagagtatgcgggaattggcggaagctccggctgtgacagccttccgtgcaagattcgaagctggtcgatcctttgatctggatgacgacctcgagttttgcccaggcctcctaaccgaggatgatgtatgttgtgattggcgaattttcaacccccttatattcgtcacccccttgaagatcgtcacagatctcaatttggatcgaccattaggggcagttttgttaacatgcttgatttatagctacactccatccactccgcatccgatcgttcttctctctccagcggctcaccggacacctcgcctctgcagcaccaaatccaaccggtgcagcaggtgaccccgtccatctcattgtcccccgctcaaaccaactcatacgttcaccctggtgttgccggcaaccctaatcatgtcaactaccagcagcagcctgcgaaccggacccgcaaggtcatcccgattatcaacccctcaaccggaatgaccctgtcaagcccaccttcatcgatctcgtccgcgatgatgcaaactgctcagcgtcgatggtaagggtgccatttgccaaagtcgtaggctggcaccctacatctccattcgtccattgcacgtccgttgtttaagctgttctgcatcatcggggtcccttaatcgcaggtcataatgtttcttttttttttcctccacttgcattcttgttcgatacgtctattgcattcgacacgacacacaacctggaaaaatatctgttccacgaatacggcgacaaaaaaaatcatcaaaattcaaaacaaaaaaaccgacctgtacatacactctcctcttcgccgattacgaccaccttcgcctcatattccacatcctttgcgatactcttagcttgttgcgagcgacggcgcctgcgattcaataccttgcatccttttcctacgatacctctttcgtctctcagggagggacgaatactttcttcggcctatgtttcttttcttccggtcgggccaccgatgatgtacagaacacgtgcagtgacattgctacttgaagttgcatgttcatgacttttggagttgattctaccttttttttttgggagggttttgcgtgcaaacgactttgccagatatacacctacgctgtggcactttattttctttctacgatctctttgtttgggtttgtttttaccggggcgggaatggatatcattttcaaggatctagaggcggaaacgatacacgtctgcattgcttgggcactgttgaatatcttgggttgctttttattgctttgttacagtctacttttctcatcttttacggattgtttctctgtacatggaatttggggattggtgaataacgcttccttgccactggtatgtggtcggttgggtctggtagcgaaaccattggatgcggagttgtttctgtttgaaatcgatatccttgggggtctctcgcggtgtgcgagtctagaccgttatgcacttaaaatgctttcattattacccttctttcatctcttccattagctctatatttcttttattgccctttttgggaactcccggagagttatgacattgtatgatgttgatttgcgttgattttgcatactatcaagtatcgtcttgggagtctggctagactgggacgttgtagattgtacttgattcctgctagacatgtagatgcgtctccgaggctcaagccttctactccgagccattccaacaccaaacacagccatctcaccgcacaagtctgtcactcattaatcgacttggttcagagatggtattccaaggtcaggggtgtggttctaaatttccttttccttttcttcatagatccgatcaaaacttctcatagataatatatcaagtggtgcttggaaaatatgtaagaacatgtatatatatggtggacaaatgcctcgctttaaagaaatacccacggagtactccgtgtgtctactaggcctgcgttccttaaactataaaactaattacccaaagtcatgatcagatctctaattaacattggacacactcaacattggatcgcccgaagatcaatatgagccaaagataccattgttctatgccaacgcaatgccaccagagaagcaaaactacaaataaaaaagcaagccacacttaacatgtcacaatgggaaatcttcagtgttttaagtacggcgtacatcccatgattgggtccctacccgctggcccttgtttcaggatcaaccaactatatcccaccaacaggcctttatttcctctgccacttcttggccttccatttccatcttagtgcccagtacctatgttggaagtagtatcaaacccacgcgcccaggacagccctccccacttatctgttacggagttagtagggtactccgtatatagatatcatctgcgactccgtactatcctatctgcgactccgtactatcctatccggcgctacccccgagccccttacctagacctgacacatccccggccccacggagtatacgtctttctagtcttggactgatggcgtctactgtgaagcatgcccagcttgtgctaagggctctgcagcgcagcgcttgcctccgataggttggtttcgaaatgccaagcgctcagaagcaaacgcttgcactacaagatacgtgctcatttcgggtcgttcttgcctttagggtggtttcctcctatgaagtttcactttgtcttgttgatattgttcttatttttgtttccggtctctttgttttcctctcttctcttcattgtccgcattgtctacattatattgtactcttttctttcttttccattcttggccgcaggtattcaagtcaggactactgcctgctgacgttcattttgagacattggcattgtctttccattcattcagaacgagcctgctcgtacagatctgctgaaagttcaccctcttgtcttgtctgttttttttttcccttgtgtttcctgtccattgcattctttaatatcaagtcttcaggctggcctgatctaatcactcctttttctttccatttccacccccatattggggctttgagcaagatgcaattcattctttttctcgctgccttcttttcgttgagcttcaatgctctttccatgcccgtggctcctccgaatcaccttcaaggccggtcctttaaggtgcagagagtcaagcgcggtgattatgttcccaacggacccgcggcactacgcaaagcataccgcaagttcggaattgatgcaacaaccctcaatggggtggacgtgagcgacttccaaccttttgaaaccacggataccacctctgtgaaagttgcaaaggaagatgtagcagatcctgaccagacgggcaccgtggatgccacttctgttgatggagatgtggaatttgtctcgccggtcaatattggaggtcaaaccctcgacatgaattttgacagtggctctgctgatatgtaagttttgtgtttattggagagcaacatgtttctatgttccagttcacaaaacgaatattccgagctaaccaattgtgatataggtgggtgttgaactcgagacttccaaagtcactgcgaaacggccgaacagtgtacgaaccgagcaaatccactacctttgaagagctcgccaacagcacattcaatatccagtacggcgattcttcctatgccaatggtggagtaggcaaggatgttgtttcgattggcggtgtcaaagttgccgggcaagcattcggccttccgacggaaatttcgcagacattcgccgatgacaccaagtctaacggactcgtcggtcttggcttttcttcgatcaacaccgttctgccacagcgtcagaacacattcttcgacaatgtcgctcccaacctcgacgagccggtcttcaccgttcgactgctcagcaacggtgtcggtgagtatgaattcggaaccgtcgatccgacaaagtaccaaggcgtcatggccaatgtcagcgtggattcatccaacggattctggcagttcgactcggcacagtacgccataggagaaggccccttgcacacgatcgccaaagcaccccaggccattgcagacactggaacctcgcttatgatggttagccctgaggtcgcggaagcgtattataagcaagtcgatggcggattatacgccaataatgccaatgggtatatcttcccctgcacctcgagcttgcccaccctatccgttgcgatcgggtctggttatttggttaccgttcctggatcgttcatgaattggtccgaggttggaaccaacacgactactggagaaacaggtgagttttcttttctgtccgttcaagcttatttgaagtatgagttctgggctaacctttttttgacagtgtgctatggtggccttcagtcgagcgggagctcaaccatggcgatctatggcgatgtgttcttgaaggctttgttcgtggtctttgacaaacgcggaccttctttgggattcgcagcgcctgcttaagcaaaaaaaaatccgagatttatccgcccctcaatttgtgacaatgtacaaaaacccatgttttcatcttttcatgtgttggcagcgatgcagagaggaagaaatcccatttagacgcacaataataatacggaaactggaaatttgaattcttcatattctcatgggtatgcgtttagttttattttcagatataccgaacacttcacaccccctaccgcacagtagcattggccaagctcttaacagtacaaataccaccggaagcagcaaccagctttccaagagcaggcttaccctcctgtccatggacagcgggaacagcactgctatcaaagacgacctcacggtccgcagtggtagtgaaacccggctggaaagtctcccagatcttcttcttcgggttaagctgcttctcaggctggccatcattccagccctcaaagctaatccgctcaccggcaggagcatcagcaggcgggttaacgagctcgataggaccggcgtgcgagtcctcgccctccgcaacacgcggagacgcagcgagaaccatcgcgcaagacttgacaccgcgcatggtcacaggctttaggttgcacacagcaacgatcttacggccctgcatctcctcaagcgggatcagtccgttcagtccggaacacacggtccgcacggtcttgccggtctcctcatcgagagacgtgttctcgcttcctggggcgtcaccgcagtcgaccgtggacacgtacagcgagtccgcgttcgggtggttgatcgcacgcaggatgtgtccgacgcgcaggtcaatcagtgatggggctggtggcgcagcgggggcaggagcggacttgggtgccttctctttcttctccttcttttccttcttgttggtcttcacgggggcgccgtcggcgccgacctgagcttttgcggcttgctcggccttgccttggccgacgacgaggggcttggactcgttgttggcgtcggggttctgggcgctagccttctcccgcttcttgcgctctttctcctccttggggtcgacgggcttgggcacgaacttgacgtcgttcacgtcgatggcgatcttctcctcatcggggatcttgagcgagaataggcggccgttctgcacgaagtcgacgtgacgcacaatgtggtggtagcccttttctccggtgcgctgttcaggtgtccatttctcaacgacgggggctagaagagcatagatggcaatgtcggccaccgagggcttcgcaccgaggagggtggtacgggtggtgaggtgaatattcagctggtcgaggatctcagcggtcacatccttttggtcattggcgagagaagtcttcaggccggagacggtgtggagccattgcctgatgtcagcttcctcttcctcattcaaggtgacctgagggaagatcttggcggaggcgtggaggtagtcaggctcggtcgattcggaagagattacggcggggtacgaccgatagagaagggagaggagagatgtctcaggagctgctgccgtcgccatggtgtatgttcgtggaggggttgggagtggaagaagagaaaatcgaggaggggcacggatttgagtcaacgattggacccgcggggttgtcagtcgggcccgcaatagagtagacctgagagaattcagcttgacgacgatcccttttatatagggattctggtggaattttgactgttaatttaatattaattcaccaaagcaattgcctgatggtttttgtttcctggccgtgctgcgcttgctgactcagcggtggcctggccagcccttaattagcataacccttcctatcttacggagttcggggtcataatctgtccttccttcatgccacttacagcatagagatagacatattatcttctggcagcatgacacaatcaaatgctaggactcttccaaaactgccagcagaagcgatccgtttggctcaccttctcgatagcttctttaaaacaaacaaaacatggactggtctttcgcaccctgaccagagagttctgattggatttattgcgcagaaatatgacatggggtctactctcgcggccaatcatattacccgctatcctagaatatgggcacgcgaggagcaccgagtgacagaagcgattcaaaaaacggttgatctagcctcgccgctactggatggaagtttgagatcagttcttaaggcgaaatccatatttgacatgcccgtcaagctgatggagcttattgtgagtgatctatcagacagcgaactttccaatctttgccgagcaaatcgtgatctctacttgagtgggtggctttctcggcgaggtatgcaggacttgcgtgcatttgaacgaagcctacaaggaaatatggaagaatcattcatcaaggcagtcgaagcactctttgatgtcccgtagacagtgtcgtgggatacaactccattatatgacatggtgaactacgaaaatgtcggattgatacagttcctggtttttaatggcggcttgcttgggttagaattacaaacactcattcagaccaccctacgacatatctatcaggacagagaggatagaaaggagtgcgaaccactgagaactgtttgacgtggggggctgatcccaactatcgttttcataacggctgtccttggatgtggcatgctattaaatcagcgtcggcggaacgggaccagcaccattcatggacaaagcaagaaaaggcgtgtcgggatgtgcagctgctgcttgaccatggggctgacccaaattctgtggggtctttggcgacaatggattcgatgcttcatgtagcatgcctgcattttcaacctcaaatcgtaaaggccttgctcaaagcgggtgcacaccccaatgcaaaagacgcgcgtggccgcacacccttgtttatgctattcgaagaatgctggcccaacgtacatcaaaatgaatatctgcttgatatgtttcttgcagacccaagagttaagattgatgaacctgacaatgatggctgtacgcccttgggcgctgctgcgagttgtattgcaaccgtcagtcgggaatttgccaagaaagtcgttcgtatgcccgatgaagtcgatatcaattcccaagacataaacggcgaaacaccattttctcgggctatcgccgttaacgagtatgatataatccgtctactcctggcgtaggatagacttgaccccaacctcggtccgacagatgcatttccgtcatttcttgctgttcgtcttaatcaacaacagacggttgagtatttgctggactctaagcgactcaaagtcaacaagcaaactaacacagggcagaccgctttgttagaagcgattcgtgtaggcaacacagatgtcattaggatgctcgctaaagccggtgccaacgccgatattggaatgagcgaaggcagaaccgctcgacagcagatgtcggctgcgggtacttatatcaaatggaagacgagctcgatatgaagatcaaattctactttgcttgctcctttgcttctgtgtttctataaaagggtgtttatctattgaaatcaaagttgcaccttcacagaaaagtctctagtcaatgttccgtacggcaattggaatctgatagtaaattatttgtccactttgacatggtagtctcccgatgtgaagagtggtatataaggatgtcatgagcagaaagaccttgatttaacgcatacaatgagaccccagatgaagtttccagaaattaaattgagaaattagacctaaacgattctagcaaccctgcaccaaccagaaagaactctgagtcctaaattaatatagcaataaaagaggatacaaatttgactaatatcgtcgactctttttcttccctttccctttcccttttcctcctgctctttttctcttgcgtgggtgcattagctgctcaagattgatgcccgtccgcgaaatcgtttcctgtgcagtcagacccgtgctatctcgaatgtccagctgagcaccggctttgataaggagtttgatgatatgccttgtagttggcaatgtcaaagcgagacgcccattgccatctttccggtttgggtcggttgccttttcgcttagcaatatctcgaccatcctttccattcgctgcgaaacggcgaaaaacaagggcaatttcgtagtattgagattcgggttaatattagtctgcgacagcaacagctcggtgactcttttgtttcggctcgctaccgaatgatataataccgtcctcccatgaatgtcttgggaattgatatcaacatcggaattttgaagcattctttccacaaaccaagtagagcaggctgtgttacggccagcagcaatactcaagggtgtacggccattctcgtcacgtcggtcgaggtcgattcctgtagcttgaaggaggaccttgattgtggccttgcagggagagtgggacttgacacaattatttcgaccaacggccatatgaagaggcgttttaccattggggccaattgcgtttacattggcaccatacttgatcaattcagtcacaatttctgactttctcttggaattgcaaaggcagacagtcacatgaagtggtgatgttttgtcggatatgtggatatttggatcagccccgtgttcgagcaacaggcgaacattatcgacgcttccgggccgctttgaaatcttgtatatgtcgtgctcatgttccgtcgaacgctccaaaatatctgcgcaaagagcacggcaaccacaaatagcaaccaaaagtattggaatacgcccaagatgcaagtcgcgaagggtgggccaatcgctggaacaattcggatcagcccctagtttgaggacttctttaacagacagatgtttgggccttgactgttctagattgtcaaacagcgtgtctatgaggaattggcgatacaattccccaccaaacccccctttcgaagccataaactccagcatatgaatattgttggtgttaatgacatgaaacaatctccacgtgaatttatcacccatacttcctgccatattcgaaagttgttcgactgccttctcgtaaactgtcgggcgagtgttattcaagctccatatcagtgccttgatagttctgtccagtggtctccagagcttaaagccgatcaccttggagagacggcgattcgattgacagagtctaatgagagactctgtcggtaactgacctgcaatgagctgcaacagctcgttaggcaggtcaagtattgatgttgcgaatacttgtctcttccaattataaaaggcatctgtcatgaatattcgcttggcatctctgagaaagactcgcgctgcctttcgccctgactttcgcgcttgtcctccattggtcaaccaccaattcggaaaagggcatttggtcgatgcaaggattcgagagctggaaatagacatgtcagagcttccgatactctttccttgctctgaataattcaggacgatgaaatagatcagctccacctcatcgggctggatcttgagggaccaccgagggtttgcatggaggaatccaaaaaatttgcatgctgcattgattgtcgcaattgacgtggaatctaatggagcaaggttagacaacgacatactgtgaaaaccccaggtggatgttggagacgtgtctcaggaaggtagatatcacaataattcatatctgaaggctgtagagctgatcatcatgcaataatccatctttaccttggtatgatatcttgtggtatgagtcgtctttaataccatagtcacactgagcttattatggaagcttgtcgacctcttccttagaaggatggccgtctagaatgtcaatggcacctgttcaatggtagattaaaggccttggcggttcctatactccgtagtgcccagcgtgtcttttggcgatcttattatgcagtctaatccgagcttggatgtgtagatgtaaccctgatcaatcttccaaggttggaagtgtatgtacatcctagagtgcattagcgtatctcaattcttctctgtgattggtcaattgaatgacgctaaaatgagtcataatgagtcgtggaggcacagtcgatcaacaccaatcacatgacgcttactgtggacccatgtggtgctgcggttcatcccttggtcttcggattcttttatatggcctggcctcgtccttcaattcatttcctcaggacaccactcctacagagttggccccctatccacattcaccctagggtccccttcgtcattctcctatagagcgtcacgggtctgcaaaggcccgtctaagaaatccagcgatgcccgcctgcagttgttcgagcgccgcggcagcgatccagacctccgtccactggttccaacccgccctacaccggcacgcaggaacgccatcaagggcctgctgattattcgtcatgggcgaatcttcatccgtacagtgataacgacctcttctcatcgctagcgccgccgctggaaggctttccctcggctgtgccagtctgccaatccgttgacgccctcacacacgagtcggcactctgggcagaacccgatctgtcctttgccgatatcgactggaatttcgtatctgtggatgttccgacgccgtaccttcctaaccacgacggtggcgatgtccccgtcatggatctcgggtatgggggtctctctgctttcaactctctttcggattccggatcaatcgagcaccaacactatatctctacgtctcttgctcctagctccgccaattcacaaggtaggattatattctccagtcaagtcagcggggtctagtttctaacgtttaaaagacggccactcgcatccttcccctatctcttcgttgactgctcccgtctcgacctctctctccagcccctctacctcccagggcgatgatactctaactcgtgttgattcgtcacgggtggaaaagcgtaaactcaacaccctcgccgcgcggagatgccgccagagacgtgtagatcggatgaaggaacttgaagcagagttggagaaggttcggaaggaaagagatgactggagacttcgatgttcgaagcttgaaggcgaaacggatgctttgaagggcctcctcactcgcaggagcaaggatacatagtaggatactcgaagattggagctggtctcaactaattcaattgattttggaaatccgtgtctttgtctgttataagcactattcgtattccgtactttcgggtgcagatatgccgtcaaacttgtccccctacatcggtattgatattaaggaatgctagttagtatgttgtacggagtagttgtatatgttatgctctgtagtgggatatatatttgttgttttacaaaaaaaaagctaacatattcgaggaggtttgataccaagtccctatatggaatgaataaggaaagttcaaggcgaggtttataagatgcatatagttatgctgtatgcaactacctaagcgggtacggagtatttctaaggctattacggaggtcacttcagagctggccacctcgggattagctttgtacaacattagaacccgggccgtctactagaacccgggccggttattgggttgggtacaataccccggcccaatgcacagctcagcgcgagttgggccccacaggtttaatgcaaaaactacatagtctaatgcttgacataggtaccttttgtatggggccatcatagttatatgtcaaaaagatttgtaagtgatatttcctaagcagactaaagggagataagacaatattaacatcgaggttactttaagattcgggaacaaacataagcttcttagagagtctatgtcgttattatgttaaaagggatcgcactttgaaggacccctccctagacagcacgttttccttttcagaaattcctaaataatggaattctcacattatatcctctaaagcttcgtttatttggtatctatttatggctgagaaatgtgattttgaagagattgtaaaccttttgcataacggccatatacggagtgtgaaaggtaaacatatcaagaaacttgcattagactatgttgtacatagtttttgtgcctaattccgctgggccgttccgggtatgcctaaccgatcgtaacactcgcatatatttaatgaggacatttctttatatcagtgtaaatttcaaccctggaatctctcaatatttccatcgacaaagttcactcttcggcccgttccacacaagcacacttacccgttaacccaaaatccattcatcatgagagctgtacgcttccatggacgaggtgatatccgcgttgatgagatcgaagagccagtttgtggtgatggtcaggtcaaggtaagcttagcattcatgtttatgcgttcgcaacgttacctccaatattctaacaacgaaccttgatattaacagattcgacctgcatttgtcggaatatgtggcagtggtcagtaacgtgcgacccaccgttgactagccatttctaatccaacccagacatccacgagtatcttgctggcccaacgatcgtccctgccaccccacacccattgacagaccaaaagctaccaacaacactgggccatgagttcagtggtacaattgaagaagtcggttcaggcgttacagggttgaaggtcggggatcgggttgcagtgaagcctaacctctacgactccacatgctcaaactgcacagtgggcaggttcaattgttgtgagaaagtaggatttatcgggttcagcagtaagccatactaagtcttgtacctatgtatcgatattgacagctacacaaggtcagtcaggtggtctatcggaccacgcagtcgtggatagcagacatgcaattctgctacctgactccattcccctcgatgtcggtggtaagaatgaaccatttccaattcacttgtgttttacgtgtttcagcgctgacggggtgtggtggtgatacagcattggtggagcctcttgccgtcgcatggcatgccgtaagccgcagtcctctgcagctaggtgacacggtacttgtggttggggctggaccaatcagtttggctatcatccaagtactgaaagccaaaggtattacctcaatcattgccgcggaggtctctccgcggcgacgtgaatttgccctggccctgggcgccagtgaggtctttaatcctattgaagtggatgtggttgcacaggtacttgccttgacagacaacgtaggtgcagctatttcattcgagtgttccggggttcaggctgggctcaatactgcgatcgctggtctccgggcgcgtggcacgacgatcgtcgtttccttgtgggaaaagaagcctactattgatgcttctgccttcgtattccaggagaagcatgtcacaggagctgcgctttatgatgatggagactttgaagctgtgattgctcagattgcttccggtatgtcttgtttttacttcctaattagatactctctgctgatctcttgcttctttgatataggcggcattcagcctcactcgatgatcactagtaagatccgaatggaggatattgatgagaagggattcaaagccctcatcgaggagaaagataagcatgtgaagatcctggtcgacatttctgcatgaatcacgcggttagctcacatgtctgtatacatatttcaattttgaattgatttttatgacttttatttacgtaatattcaacataactcggactgtgcgtcaacctttatgcacgctagctacgcgatataaatgggggatggtctagctcgatcggggcgaaccttcggaagtcggaccttacttctcgtctgagatccggtactgtgtaatccagtgcgaatccgaatcgggctcataactatcgactaagccgtatccgtaaaggtatatatcttttccccttgctccaccacccgcttttccctcaatttccgtcctatcatcgtcccatcaacgaagccgtttcactgaccatgtcagatttactttctggggcctccgtcatggagaccgcggcggaagtaattctgcgacctgtccctcccctcatccagataaatggtacgcgttatgtatccaactcatctgaggtcatctcgttacggtttttccatgaatggcagagctttaaacaggatgttctcgaagcatccgattctttagatcttagccatcctgtgccttacacagatgatgtgtcagaaagctacgtcgttggaagcggacttggtttgaccggaaggttctccaagaatgtctatgacccagtttcgaaagtgtttgccactacttgcctctcccacttgaagttcggtgattatcagtcctctgcagggccaacggacacgagtcaagtgcctcatattactatgttcaacacaatgggaccacctcgcccagcggctgtcggagaactaaagtctttctggacagttgaacttgaggactattccattcgcgaaggctatcaacggtgaatcggcatccagcatcacattggtaagtccagttgtcaggtgtaacgggagcattgacagggtaagatcgtactattaacatctgaacaatgctgaatgtttgtgactatctgtattgtctattagattccactgagccgaaacgtataccatagtgttgtataggtgcagcccccatttcaagcgatggtcgaaacatcaacaaatgatgcttctgctagagtaatacaacgactacgagctcgcagagttgggcagctcagctcgcttgcgatgatccaaatgctccagcttctcggatgtcttctcgctcgagtccgagtcctcgcccaataaagccagtaagccaatctccctctcgatccgacgcttcaggacctcgtcctcaacggccatgcttccggatccgaacaattcatccatctcttccagtgtgcgacccttggtctcggagacgaggaaccacacatggaggacaccaatggtggtcaccaggccgaagaagatgaaggtaccgtaattcagaggcttcgataaagggagaagttgacagaccgaccgcgaaattgttgagctagcatcctgtcagaactgtataagacgcaatgaagtgcacatatccagttgctacttccaccaatactaacaccctcggcgcgcatactcaaagggaaaacttccgacacgacaatccacgcgacggggcctgcttctgttagtgcgtctgtcagagtccaaaaattggatttaccccgtgcgtacggaatatgcaaagttgataatgaagatccacacaaaaagaccacggcagcccagccagcccccttatggttctcgaattcgcccgagtacgcagatcggtcataaggatctagttaggatctagttaggatctaatcaagtgattaaatcgttagcaatacacccaatatatttgacccgtgaccaataaagataaaatctaaggacttcggttaaagctctaactaattatatccattattctggaatttaaccctaaacccggttacaatataaactaatatatataatcttggaactatcacaacaggtgccatggtcatataatgacgtgacacatcgctctgtccgcgggctgttagccctgcagcccccggtcgggtggcgccattgatttttgattttgtattttgtattttttggggctattttcgtctgaaactgcaattgttttggctttgtttccttttccttttatattccacgaaacgtccacgcagccgcatccaaccagatctggcaatgatcgattataaaatcttataattacttcgcagcacgcaataatacgaatagcgtggggtgatcctaggcccttggctggctgactgtgttgggggcattgctggcagtggggaatgagtgtgtttttagttgacgcctcctggctaaagatccgggcaatgtcccggatatgtatggacgtgggctcgagaccttgcccagatctttagtcggggttggggtccatggtcgatgttgatcgggtacgagattcgagatgggtttgcggcacaaggacgccaatggtgcgaactaacctacttcagcagtgtcgatccattgtctcgagactctccttgtgttctaattttacggcatttacggagtacccttgcagtactccgtaaaaaaatttagtcgccgtgccacgcatcaagaagatcataggctttcaagccatttgttatttggcactaaccttgggaggcagcacgtccccagtgttcgcatctgattgatccaatatcgtcaatatcgtcgttttgtggtaaacacgcctcagccgtgagctgagacagacaccgctaatgtctgatataattcattggcccattctactgcatggatccatagggatggggcgggttagagaatttttcgatccaacctcttaggtatataacacctttcgcttgggctacgcttggacaaccccctttttagttcaagttccctttgtcgcgcaatattttattgtcttctgtcgtccctatatttggagccgagtacccagcattacaagtgcttgaccactttttcttttctacggtggaaccctaccgacgtttataacctcgggaaattcttgcctaaccaaaagccggcgacatgggtacaccacttacagaaacagtcattatcactggtggaaatgggtgtttaggctcagagatcgccatcgagatcgcgaagaagcagcctttcgttcatctattattgacggcacgggatataaggaccgatgacgtccgcgacctgatggggaagatccgtttgatcggccctaggtcaatagaggttctcactcttgatctgaccgatctgaaatctgtggcatgtttcgccaaaaccaccgtcactcgtgttcgctccagagacattccgcctgtgaccaatctgattcactctgctgtcgctacatcttacgttatcgatgagctcacatcagacggctacgacccggtgtatcagacaaattgcctatctccatttttattgaccgtgggactgctcgaggctttccgggctggagatggtacaccaaaaggcggagcgaaggtgatcctcatcggctgttctgcgacatcttccggggaattggattacttcgaccgcgaccatggaagaaacggaaggcaaccgggaactgcgctgagtgcaaaggaagagaatattcgttttgggagcagcaagttaatggcgagtgttgcattatatgcattgagacggagcctgatttgggtaagtgaacttgatcggagtcattctctcgatttccaatgcaaactcgtacagtttactaataaatctaattatagaccggtcatatatcgcttgacatcttcacactggatccaggaggcatcactggccagagtaatctgcggaccggggcgcctatgtcggtcagagtcgcacaccagactcggtccgggcttcggccattcctgcgtatggtatcccgaagctccatgaacaaggccagtgttccagccaaggcaatcgccagagttgcattccacatcgacacggtggagaactggcaaaaggaacgctactttattctcgacagcgagtacgaagccgcatccgtcttgccgagcctgcgtgatggggaaaaagtgaacaaattattaatacagatgatgcaaatgatagaggtggaaacaaaggaggtgaattctcctcctattccacctcaattaagcgtcatcccgcctcctacgctttcactgtgaagggacggacaacacatttttagcattgggggaatactttttttttatatgaaattagcgaagcgaactggcacagccaaagcatttaatctgttatttaatctgttctttaatctgttatttacttcaattatttctagatcatgttataaactgcctataacaggtggaaaccaggtacaattccgacgatgatcgcaagcggatgaccggatttggtgaagaccgcgacagctgcgaggccttcgatcacctcaccaccaggtcttccgaggtcctttcgcttctgttctgttcattttttgatatttcaatccttccgactttctttttctttcatttaagccttccaagtctggcctttaaaatcggggttgtcagaaggtctccggccgctacatcagttcttggcccccgacataagcgccccaacggcttatgacagcgcccgcagtgatgaaccgacacgtcctcgaaaagggccactctgcttaccccaggggctcggcattttcaatctcaccgaacaggtaagccaaaccacctagtccgatctaagtggcccctttcccattgtccaagcgttcagccctgtcgtcatgccagatcatgaagcttgagatcgagactgactagtatgcgcctccaggttccagcctcgctcgcaacctgcccttcggagacgccggcagctcatccagcgcctctgcctccttggcggtgtgtcaatagtgctcttcctcttgatcttcccatcctggcgcgccgccatccttcccaccatctcgcttggccttatctcctaccccggagatctacacctacagacggtccggtactatgatttatcggaagtgcaagggacggagaagggctgggaacgcggagagcgtgtcctgatgtgcaccccgctccgagatgcctcgtcgcacctcccgatgtttttctcgcaccttcgaaacctcacatacccccaccatctaattgatctggcattcctggtatcggactcccgggatgataccctaggcatgctgtcgcgtatgttggaggaaacacaaaatgccacggatccgaaaatgccctttggagaaatctccgtgatccagaaggatttcggacagaaagtgcaacaggacgtggaaagtcgacacggattcgaggcgcaggccagccgacgaaagctgatggcgcaggcgaggaattggttgctgagtgcaacgcttcgcccaacgcacagctgggtctactggagagatgcggatgtggagactgctccgttcacaatcattgaagatctaatgcggcacaacaaggatgttacggtacccagtgagtggtgaatattgcttgggttttgtgatctagactaattggcctcgtctgtagatgtctggcgcccgcttccggattggcttggcggagagcagccttacgatctgaactcctggcaagaatctgagactgccttggcgcttgcagataccttggacgaagacgctgtcatcgtggaaggatacgccgagtacgctacatggagaccccaccttgcctacctccgcgatccttacggcgatccagatatggagatggagctggacgggatcggaggtgtcagtatcctggccaaggcacgggttttccgtgctggtgtgcacttcccagcatttagtttcgagaagcatgccgagacggaagggtttggcaaggtaagacagcaatcaacgaggtgggagttataattgctaattttgcttagatggctaaacggatgaagttctcggtgattggactgccacactatactatctggcatctctacgagcccagcgtcgatgacctgcggcatatggagcaaatggaggtagagcgactggctcgcgaaaaagaagaacaagagcgagccgagcaaaaagatagcactcagtccgagtccgtaggtaacgatcacactgtgaaagggggagaagtacaaggctctgctgaaggcccggctagccagcccgtgaaagacgccatggattctactgagggtcatttgaaagctcaagctgagacagtcgaccaagccgagaaggtcgaagtagtcgagaaagcaaatccatgatcctcgactggctttccttcaccgcttctttgatccagccggctggattacgcattgcattctcacatgcgacttgaatgtctcatctccctgggaagactatttgtctgtttagattagggcatatttatgcccaagctctgcaagtgtaggagctttgcttttcattcttgttctgtttcttgcacatgtcttttatatctttgggggacatttctctttccacggcgtcaaaatggaatatagtggttggcgtgttatggagatcaataatttgactattcaagagcaacacatacaagaattgtacgcgtatgtggtctctattctagactaagatgatataaagaacgttttatttaagattatcctacgttttctgtttaggttactacctatgggaacttgttccccgaggatatagcgtccttacaaggtcatcccctcttttagcgcgtcgtactgcattcctcaaattatctcgaacgaataacacgacatctgttaccggagagtcctatattaatggcacaactatgactactacacagctagatctacccttcgacaaggttgttggccgtcctcctcaccaacccctggagaaagacttagtgataccagagtaagagctgagaagttttgccgaggatatctggagtgagcagagtctcatataagtcgtttcgatcctgatatgttcgttggccaccaagcagcagacatcatggaagacgatgttatactcacgaaggacgtgttggttcgaaagatttctggggaggtgcgtggctgctcgagactcaagccagggtcttataatattcgggcttaattgctgatgtctcacgtgtttatgctgatgactattctatttgtaacgttacttgactatcgtgggcctctgtatgatcatattgctactttgtctgggccatctttctcccttccttcggatctgattcgctcccgggtgccccgctgcggcagatacaccccatattgttgggtgcagaatagggggcggtacagggcagcgggcggtcaagcggcaactcgccgtccaaagttacgggtggaaaggcggccgtttctgacgccagaagctgtcattttcggcgtcgatttcacaggtccccatattctatgtgtaatatgtggttatttgattggtgtaacaatataaccaacataaacaattccccagggctcaaatgaagacattcggatgaagccgaatacttcttaggcggtggtccgtgtgtctccacttcgcgtcaacgcgtccgaagtcgatgcggcatttccccgattctcactcgtcttcgacttgcatactctatgcacattgtaagcctgcaatgtctactcaagcctcgagcagtattcttttcacccactttcgcccccaggaaggcttccggttgctagagctgaccccggagctggaagaactactgacatcgaaagatgcacctgtgtaagttgacgcaatgaacaggagtccaagcagaccagaagcaaattgctcgctgccatgtccgaaataaacccagattggcagcccttgactaactcacgacacccagactcgaactcaagtcgccctctacagctctcgcacaagcagtagtcgaccccaccgccaacgactacgtcaacctatgcacaccaacgcaaacctaccgcatccgccaagtccaatcctcaaactctctacacatcctccgcccaagccacggcgagatctcccaagcagacatcaaagtcgttgaagaagaagccggcgaaagcggcgcattgaacctcccagatgaagctgtaacggccgttgcgaagtgttcctcgacactggaactgcacatcccgccgggaggattctcagccatcccgttcctagagaagagtctgcggctgtatgaccggcgcagcgacgatgacggggacatagcgatgggcggttctgctgactccacaagcccgctggggttcaaggagatgcgcactgtcagggagaatgtgtgtcaggatatccctgtgtcaacggcacagtgcgaacagggctggatgcagctttgtgcgtttgtggatggggccgaggaggtggcgtgttggcggccctccgcgcggtctcgattgactgtttggaagcggttagtcgagggcgctgttttgcagggtattgatcttgagaagcagtttctcgttggggacttgtggaagtctgttttggatgatgaggaggaaatggagccgccgttcccacgtggattgctggaagctgttgtgaggcgcatctgcatcgcagatgagcggccgcctttggcggatgatatcaaatgtgagttgaaatagatgatgggatgttgtaggtatcgggatggctaatgattgtgttgttctttaggggcaagctttgataagattgaatgtacgcaatgggttggcgagacatacttggctgctgccgctccgactgtgtcgtctgctattggaagaagtgaattccttcgcgcatggaaggactgtctgcctgagacatggagaagagaggcagccctgtcaaaactgccggtaacttgaccttttcctaaatgagctgcatcgcaatagctgatttggactacagaatggctgctacaacagtcctgaccctacgactatctgcttcgttgaaccctcgcaacggcagccaaccaacaaaaccgcctctgcaccagccacagccgcgaaagctaagaataccagaaattggcatgaactgctcaaaggccaccgttgattgcaaaaaaaaaaaccactgacgcacttgctgcgtaaaatgccatggcatctaatctatgatgcgcgcatcacgatcatatctgccgcccaaactcgccccgatctcggacttccaaaaaaggaaatgggaagaatcacgagcaaacgaagaaacaaatctcgaaatgatgctccaatgaatgaataattagcaccaagtgtacttctcattcaaccaccactccacgtccttgcccaatccttccccctcgccggtccagcgtaaactggcgatgctttccttttcgcggtgcacgagctcagccgtcgggtccaccaaagccacagccttctgcaagagggaagtagggttccagaattcaaccttgctcatgttccactcgtgcgcctcttgttgtgctcgctggaggatagcagccatagcttggacagtggcctgctcctccgccggagacgtgggctcatcatacagccaccgaagaatatagaggacgttatcctcgggcacctcgccgaagttccgattccaagcgcaatacacgcgggcctggtcatcaccagcgcccttgactacaggtggagagcgtttgggaaacaagttctcagtataaaactcctctcgagcccaatgccacaaatagtggtcaaagttaggcaaaatggcaatcttagcaccactcgtcttctgcgacgccagacgcatctgctcgcacagcttggcaagcacagtctcactgcacaaacacttctgaacatcctcggcaaatagattccttgtaacagccttctccggctgacctggagtagccggtaaagaaatatgggaagatgagaacggccgccacccaaactgagcgtaaaaattcttcccgatatccgagaaaagcaccgtaaagagcgacttccgccgtggctctttctccatctcccacgtctcgagtttagtgcttagctcttctagcatccgctttgcgtaccccttcccgcggaaagcaggccgacagtagacactccccacgccgtgcgtggaaaccttctctgtctggccgtcgtgtgcgagcagcgctgtcttccggtacgactcgcacgagctgagaattgtgcgctcgtcctcgggctcgttgcggtccactaggatccagcaggttaggccgtcgcgcgtcagccgttgtcggaggagatggttctcgcgttctatgtatgtttccacatccagtggccctttccaggcaacgctgttcagcttaattgaggcaatgcgttctgaggctgtggctggagccaggatcagatctggggaatcccctgtggggagggcggggatctctgcggcaatcatgttgaattgagcagagttgaagtatgagttattgaagctaggaatatggtagagaaaggacaacccaagggcaagtgcaaaagaatatataataacgagaaatccggggttaaagtcaaaagttaaagatgttccgaagacaaaaaaaaacaaaacccagaagtttggaagattccccgtggaccgacgggggtccgatgccataatatactggtcatttcgaacttccacaaatagtcacacgaacatagtaggttcttccgatctggatcactacaattggaccacacccaatccatgcctcctctgccccctcaccttgcattccacatcatgatccgggccggatctgcctgccctatgcgtacaaagtaaaaaaaagacgcacaccgtgtttctctttgtcactggcccgaagcaaagcgatggcaagcgatggaggttgcattgcgttagcccttataggcccttgacgtaagagccagtcttttgcctttcgcggagggttttgacgggtcatgtgagccttggcaattatgtcattgtatttatttactcggacgcaacctgtggtgttgaacttcattttatattgcaagtttgagttctatatatcatatgcaatgaagctttgaactatgtatgtggcggaactggacgtcacgcgatcatctttatacatgcggaaaaagatcccgattagtgtctctcctgacagtgatcagatagttagttgcactccaatgcttgctcagtctcaccttgggactgtagctcactccctcttgactttcatcacacaagtcgataatggtttctcgggaatagacaaagcacaagagaatagctccctacagttcgctttcagcagcgtctatttatctaggctggatgactacggaatatggttagcacagttacatacagcatacctaggtagtcacccgaaggcctaccagcctattttcatcggccagatccaggaaattaaacagaaaagcggcaaagatagacggagcaggtgggatgtaaatcaaatgacacgaaccgagaaccgaaatcagataaatatttgcgacacaaaagacaatatggcattatggacgttcgttttgaatggaataattctcacgggttcatcagcataagagcaaacacggaaaataacaaaaaccataacataacgagacgacattgggaactatttcctagtatagttgaattggctagagaagagaatcatgtagttgatttcaacaaaggagacgaatgagatacaacggtaaaatgggagatggtatgggaaaaaaagccggaccgcagcaaaaaaagatcagagagtagaaaaaacccgggtccagcaagatgcaaagtgaagtagacggaaagctataagaaagccagtaggaaatagaaaaggaaggatggagaaggagcgtcatgaatgtgagaatgggaagagcataggaagaagaatgagctcttgggaatgaagtatcaaaaaggaaagatatgaacctggtctatgtaataaatgccatgtgactcccaaaaggcgtccgctcccccgttttatatatttgcgccacttgcggacggcaattccagagtttccttcgtccatcatgtttttttcgatcgttggtcacgctaaatcaagaatgagatagaatttgggcgtggacaaggggataaaaaaagaaaaaggggaaataggggaagagaaaagaatagaaacaaatagacatgaatgccccccaaggcctgaaataggatcggagaatgtcgagtcatggtggctattccgagtccaccggttcgttaaatttctgtcgtgcttcttctacccacaactccaaccgaagctcaccggcttcaacacgtcgtacaggtactgttttggcacggccattcgagaccttggggggcgattgctggggattgccgttccgctgtttagagacggaaaatggcgcagtgcacgatcttaggtgcaccttgcccggttcggccacaatccaagtttgttcttccttggtggtccccgcaggtggtaaagcatcttcccgcacttcaatgcagacagtgaaactgaactcgtcatcgcggggaagcggagtcaaccgggcacaggctgacgcgagtctcgctagacatgcccggaattgtgcctcgaggtcaaccgaggttggtgcgggcccccggtctgagacaggggcacccgaattagatggatcttcggttcggtcttcaaatgtagtattcacctctcccggaggcgcacgcgggaagcccgacagatcaaaggcgtatcgttcgaggggctgacttgtgcgaagagatgaaataatgatactgactgcggtgattgtgcccttgagaatctccgtcccgactgcgattgaagcatcgttgatgtagtcacagacttttgggtgacgggattgtcggacgggatagttgtatgcccgcacggggaggaatgttgcgcgcggatagacggagcgcagaaataggatttgatggacggagacggtgaggaaattggtgaaggaggccgctaacgctgattggtttgtgggcagcgacttggtagcagggaccggagcggagaaagtggtcatggtggtggtggtactactgctctcactggcaatcggcattgccgtcgaacgcgcggtgagggtggtcttgacgaggtcttgatgaatctgaatgatgttccaccctaaagctaatcatcgctctacctttctaagccatcggtcaatgtcaggttcaataacttccaggtggtgtttatgttttggaatcggtcaaagttttttgagttccccgatactccggccagcacgggtcaaccgtcacgatgatccgcaggataaaatggctgatgagatcagggggaatagagcgacagaattgcagtcacccggggtggcatggaataaggtctatggggggaaagaaagatggttgggtatatagtgcgttggagggggttgtttgtgttgcaaaggaaatccgaaacgtacgcttaggtgaacaaaacaacaagtagacacaagcctcaaagcatgagggatagaaaaacaatataagtcccaagcgacgatcccaagtggaagagcttgatcactctttttttagatttaagaacccttggggaggggaattcggagaggggttttaagaagcgaaaggaggggaagttttgagagacggtaaccctcgagggaatatttaagggaaaaagaaaaaggaaggctggacctaagtaggaaaataatgaggaaataagaagttatagggatgaatcgatgggatgtagctctctcttgctcatcgaggggaaaagcagaagaaaggcggacaaggcgaagtcggaagggtcacggttgatgtcacgtggattcgtcatgggtttacagaattccatttcaaccacgatttacttcgctttttgctctatattgtttggttttgtatattaaaatctttctcgttttttggtgctttttttgatatagctaacattttatatagcaagttagcatggcagatatgtgctaaaattgacgtggaaaaagtagacacagaaacagagaaagaaaaatacagtagcatagtgtgcagtgtacagtgttcagtatacaattttcagcatttatgcctatatttgtacaatattccacggagaaaacaagagcatacaagatacagtttttttttttgcctctctttttcttccccactgtccactgtgaggtggataggtactctataagaggggcgatcgtcggcgaaagaagggcaccaagagagactatggaaatactagtgtacggagcacctaaatatataaaaaccgtttaccatgcaatcagactgaagaatcaacggagcataattcaaatgcttggttccggtaccttacctatctatggaagattacaggggattttatataaacctatattacctataacatagaatatgactacgttcgagtataggttacatgttcacacttcttacatagtctactttgtacatcatacatcgatgtactttgtacatgctattagggaactaccgggggtatcagtgaggtaccgggtacattgcactgcgtcatacgcctacccactgtctccagtcgcccgatgatcttcttacactgacggcagtggcggtcataagaccaggcactttcccggggaaaatgtcatttttgctttgtcatttgtgtgttcttgaaaagccatgcagaggtatccttcctgtacgagactatcaatatcttccatctgtttctacaatttccgtgtacctctagcctttatggagcttttcaagaggggtatatgtacataagtacggtatactagactctctagggctacactatatgacaggtactacaggcatacccacccagtcgcccttcattctatctagtctgaattctacggagtattccccgacccgtgtaaccgtgtgactttcaaatcatagtttctccaaaatgacaccgagtcagtttagtggaaccccatgttctccgaacgaccatgacccaatagaatcgactaaaaagatcagaacttgcaccttaacgaagctggagccggttcagcccggaccagtgacccagctgcgtatggcacaggtcctgaaatggtaatcggtaaaccactacggagtatcgaccctcaatggtccatgtccacttgatgtttgatcgaccccggaggaggtctgatctctggaggttcctggcatcagaccattccgggggaccgtgtgacctatttggagacgctattggagagtatatggagcctgtagtctaaattaaacgttgaaaccccgaagttctctcactgtccaacgtgccctataatgtccgtttagccctctgctagcaaggtagtaagggacaaaaatagctagaatgaagctttggagactgccccttgccaataaatccctgtcttcccacgctcaatttcatttaaccttggtgcttgacatagttatttttctggctgccagtgcacactggaatgatatcccgcttcccattcggccatagctaatttcggaggttaggcatttgcttgggtttatttttagtcggtaatgaaggtgtccactgtgaattagcccacctatgtacctatgtagttatgttgtaggcacataattaataatgcaaccgagaatcggagagaactacggagtaagaaatgaacagttgtgtctattgagctataccgaagttgggcttatccccatatcttagacacgcttgatgtactcctacagcttgatctcttaggacttgaaacttgaagtagtcttatattatgtaggctggtgtgtatggatgtagaaacatgatgatctacaaaagagtgatcggccgggtatgcggcctctgcccttgacaaagcaagtctttaataatatcctgatgtattggctcaggatgataatgatcagcaatagtgccaccaacaatgggatcaatagtacggagtagatcactctactatgtacactatacgaaggcagtaaaatgtactgtatagccagggactcaaggacacgggtatagtcatgtaaagaatggtacccgtagatgtctttaataataatccaattggcaggagcttcaataacacacagcaaataaagaagaagtggaatattaaaatcggggcgatatagagccgaccgccttcaaattgcccctcctccgcgtctatttatctgccgacgcaaaacattggattctcaatattgcgtgactgatactcattggcttcgaggccttcattcatctctcttctgaatcttgcttgactgacccgcgaacccaaatagcctcattaattatacttcgttcgccatggagcaagaactcctgtcgctcctggcagacacccagtcacccaaggccgataccaggagagcggcagagtcacagctggaaagcctttatgtccatgattccttcgcaatctcactcacagcaatcgcttcgcatgagtcagttccggtcaacctgcgccagtctgccctctcagtattacgtaccttcattgccgccgcttggtctccaattctcgatgaattcaaaggacaaatcctcatcaacgatgcgaacaaatccagcgttcgccaggcactattggtcctcgcgacaaatgataaccctcagcgcaaggtgaaaaactccgcaagtttcgctgtcagcaagatcgccagtgccgacttcccggacgactggcccgagctgctcccttcactgctcagtatcatcaataactccgccagtaccgatggccagatgcatggtgcattgaaggttctcttagatcttgtcgatacagggttcagtgaggagcagtttttcaacgtcgcccgtgatctcgtttcgtccctttttgctgtagctaccgctgagtccaggcggccaatgctgcgcgctctggctgttgcagtcttccgctcctgcttcgatacattggaaatggtgctggaacaacacaagacggccattaagcaattcatggatgaggtgctcagtggatggtcgccgttcttcgacacggctttgaaggcacccctaccgcagccacccaacgaggaagaggagcataaacaaggggagattgcatcgcagtggaggggaattgttgggttaaagttgcaagtcgtcaaggtatgcggtgcttcttcttggttttgccgggctttcgctgacatggttttttttttttcatagactcttatgaaaatccgcatggtgttccctgctcttttgactgcacaaagccccattttcttctcaacagtctggacagaactcaccaacgcgttgccgatctaccagaatttctacattgaggataacagacagagtcgtttggaggatgcggacggacttccccactcactcgatttcctcgttttggaggagcttgatataatccaggcccttttgaaggcacccccagtaaaggcagagctgcagcagcaacttcaaaatgccggtgcgactgccagcacgtccagctggcttccggagattatgaagctcgccagttcctatgcacagattacaacagaggaggaggctctatgggagattgatgtcaaccttttcctttcggaggagacttctgtcacggccaactacacccctcgaacttgcagcggagatctagcgattaaggctggtgaatggctgaagggtacagctgccgagggtctcctgggctacatgaacaccgtctttgctgattcgtctgtctcgtgagtatcactctgtatatctgctgtgaattatattgaccatgatgcaaatagatggaaatcacgggaagcttccctgtatattctcaactgtctgcttcgagacttcggtgaagtcgatcaagagatctcacctgagctggcatctcacttcactcaattcgtgcaatatgcgacccaacaagaacaggagctcttgcgcgctcggggctaccttgtggctggcgctttgtccaaggtcgccggcaaggcattccaacagaccacatcatcctatttggaggctactttgaaggcgatcgccgaagaccccgccgaagtggtccaagtggcctgcatccgggtgttacaagatctgatgcccgctctgccgaagggcttggcccgccccttccagcctgctgtgattgcggccatttcagaattcatatctgcacacgaccttcgtgaacagactgactccgatgatcttaaggttacgttggcggaaactctccgggacactattatggccgattctagtgtggttctatcatctcctgccatcgacgtgttgttcaacattgctagtagcggagccgaaaacttccaattgaccttgaccgtcacagaggcatttgaagatattgtggaccaaattaccgatagtggccccgattcttacatgcgtctttgcgagaaggtgcttccctcgttgatgggcgcgattgatgtgggcaatctgactgaagagaatgctttgacaaacttcgcagccgatcttcttcgcgctctagccgagcggagtcctgagcccatgcccgctggtttcgtggagacggtgatgcccaagttgaatcgcctgctgctgaactctgatgaggccgaattaatccggcccgccacagaggccgtacggcacatgctctctcacgactttgcgcagttcattgcctggcgtgatcctcaatctggaaaggaagcacttgaagttgttttggtcatcattgaccgcctgctgggcccagccgtggatgacaatgcagccacagaggtcggccagctagcagcagaattggttgaaagggccggctccgagcgcctcggtccttaccttccgcagctcctacaggccgtggcacagcgattggcgacagcacagcaagcgcaattcatccaaagtctcattctcgtcttcgcgcgactcactctcatcagcgcacacgaggtagtcgacttcctggcccaggtcaacctaggcggccagagcggactcaccgtggtgctgagcaagtggcttgagaactccgtcaacttcgccggctatgacgagattaaacagaacatcttcgccctggcacgtctatacgagcttgccgacccacgtgtggccgaagtacccgtcaaaggcgacctcatcatccaggataccggccgaatcaagacccgctcgcaggcccgcaaaaacccagaccaattcacaacagtgcccgcaccactgaagattatcaaagttctggtcgaagaactgggtgcagcatccggaaataaggaaatcgatgctgccgctgcggccctggatgacgccgacagcgacgacgatgacgacgactgggaggatctccccagccaggtccttgacctcggcattggagccacgaaacaggggctgctgaatttcggcgagggcggctccgagagtgtttttggtgtgcgtcgccgagacgatgaaacgcagggcttcctggtggatttcttccgacaggcctccacgcagcctggtttccaagaattatatgcagcgctgactccggatgagcaagctaagctgcagagtctgtgagtgcagctggctgtggttgcgagtccccttccccgagccccgggttattaatggtttgatgcatggatgcccataaaacatacaaggacttgtatctgtcgcttgtacagagtaaacataccttttttatttattttagttgcttgctacttgctccgtactgtagaatgagcattagcagatccttgtggtatggatcctggtagtttccggtctaggccgaactggagcgatccacaaatgccagttctttgtttgcacccctgtactccggactccgtagtccgtacaccgtatgcccatctgcaacattgtgttttgttgattaacttcaggctagaggcctagccatttgaagtctatgacaagagataatgataggtaatttggagtggtataatttcatagttatatggctagttaggctccttctataacccgaagcaaaaagtacataagtatagaaaattgaagcgacgagtcagaacatccctgtctctgcatatgccattccttccagtcggaaccactcagggattatccgtcccgtgtggggatgtaccagacagccgggtccaagaggtccaagatcaggggtgatccttgctttgagtttggcctttcctttttgcctttttctttttgcttcttctggcgaatattcctttcatctgtcccagggttcccagctgagttgggcactcatactcttacaacacctctcggcttcctcttctgagttagtgcttaccttttaccgcttcgttgtcaaacggagcacgccattacctgtagggatccacctgggcagcagggtctcggagttaaatttagccatactactccgtactccgtaagtagctacaacatacaaagaaaggaagggaaaccaaaaatagatgatgaatatccaacatctccggataaatcatttcatatccatcatcaaaattgcaacaatcaaggatctcttcaaagaatctactgttataaggcgataaagagagggtttcaagatttcgatatcgaattcccgggatactctatacattcacatatataacgcccaatccactgggattgttttctgttaataattgaagagaaatgaacttcactaactactatgggaatagtcggctgcttatgcggccttctcaagtcttcttaggtagtatttttaaatgtcgtttttgcccttctcgattttacagctagatggctgagaaaggtcgaaaaaattgtctgtttctatgtacaacccactttgtctcacaatgttttcaatgagaattgactttacgctactgctcgcggtgactggctcttctgactaccaatctggccaaactcagcagcggtcctcggcctgaattagtttacgggtttattactccgatctagctttcactctacgaaggctccattgctctttccttcaagctgaggttaagaaggcgaagacgataccccaaaaaagacatgcccaggtcgcataagcgatcgactactcttcctcgcctttatagtttcccggatttaggaatgcatatcaccgcccaattcttgaatgctcaacctatcaagccataatgagactcactactagtagccaaaacaaagtagattcatacctgaataaatacgtatcattagcaagtgtcgggaaaatgttgaacattgattttcttctagagcatggtccattcatgctatggacagactagatttgcaatactaattaaagatcactttcatgccatgggtttagctagaatagaagtgacttacatccaatctatccctaaaaagcttcgatgtcttgcttatgtcttcgcaaactagactgacgtcgtttctgaatgcttgatcaaaaccgaccggcagttgtcatgaaataaaagtgccttaaataacgggcttattgctgacgattctataccaagggccgagattttcggtgttactgtcgctttcaatattgaaagctaattcaagagcctagtcaaacttggttacagcaatatctgacaactggatcctgtttggagcccgatgcactaatctagtctggtgagaacactcaatgtagaacttagatttgcatactcggtatcttgctgtccagggagaacgatggctaattttacattcccaagataggcagtgatgggtaccttccgtggggctatacatgatgtggctaatatatccggaggcctgtgatttgaggatcgggagcaaagatatgatcagtactagtcagaactgaggtgttcgatcgatcgggacagatgatgatcctaggaacgatacctgatctctgcaggggacctttctccgctttcacacatctggcagaacctgatttccctccctgtagcgatcatcttgtcaacatatgacgtctcacgcagggcataaactttttggtactaagtaagaatgccacattgagaactcaatgcctggaaactcttggtcatggcctgttatcacatattagagaattgtctagctgatcacagtactagtatgttgggttatcgtgggccgctatgagactgtcttggaaggaagacccagcacagtgggccagcagtaccctaatcctagttaaccagggttgagatcccgagaattgtaaccctggaagttggaaccttggaaatgttaaaaaatcgaaaatcgaaaatctaaatttcgggtcagaccgatttggaatgggcgactttcccgtaccaggctgtcggatttcccacctgcggggtcaacaaaagcaaaggtacggaaccggccaggtggtagaaaaaaacacagtggctacgctagggttctccccggtatcctctctctcgggttccttttcttggttagaattgatagcttcatttcacttcccccccctcctccactttctctcttcatagcgaaaaaaaataacttccctctctctttcctacctttcctcctcctaatccctctccctcctcctttctgtctcgccatgtcacaacccaatctcaacgaacgcatccaagtcgacgtaagtagatcattccctctcatttgttcaatctcattcctaccccatatccctataccttccagaaccccaaaaaaggtcacccttgggcccctttactaagctcacaaccccgattcccaaacttcctacaatctccaataacacccccaaccgccactaacaaccccccagacaagcgatgatgactctctcttcgacatcgaatccctctcaggctcaaacctttcattggcatcctccgtccgagactacagctacgaaaatggccgccgctaccacgcctaccgcaacggccaataccccttcccaaacgacgaagaagaacaagaccgcctagcattaacgcaccacctcttcaaactgctcacaggcggcaatctgcaccgcgcaccaatacaagactccgacccgcgccgcattctagacatcggcactgggcccggcgaatgggccctggaaatggccgaagactacccgcgggcggacatcatcggcaccgatctcagccccatccagccgaactgggtgccgcccaattgccgcttctatatcgacgacgcggagagtgattggactttctcgcccggtgaggcgttcgactatatccatgcaagaactatggcgggcgggattgaggattggccgaggctgctcaagcaggcttaccagcatcttaagccgggcggctggtttgaagcgcaggagttcgagcattgtgtgcgctccgatgatgggacccatgagcgcgctattgctattaatagctgggcggaattgttgacccaggctagtaagaagtttgggaagccgatggatgttgcatcgagcatttcggagtggatgactgaggaggggtttgcaaatgttactgatgatatttataaggtatggtcccctttttttcccccgggtgttgtttcgcatactgacttgctttcagagtcctgtcggtggctgggccaagaatcgccgctacaaagagatcggtcgcatcggcaaggtgtctattatggagaccattgagccgtactcactggctctctttacccgtgtcctgggtctctcgtaccaggatgcacaggagcatatggaaaaggcgcgcgcggagttgatgagcggttcgcaccacctctatgtgcgcttccactttgtctacggccagcggcctttcgacgatgaacccactcatcccgaggctccctgaggcttggggctgtggcaacaatgattatcaatgagacactacgacctaaaattaggattgagaatacttctatccctatcgacctctcgatctctggcaacatgcttgatgactatatttctgcccactaatgtacgaaggttctatgtactatattgtttgttccacttatgttcatattcatgtggacatggatatcgtgaagcatccgggagttgatgtggtgcggtgattatgtcccagacggtcccaccatgacttcacttgcccggtatcggccagcgacccgggctatatgaccgacatatccaagtgggggtttcaaatactcagctccgaacttgacccgggccacttgatttcaaggcattcggaatatgcacacacaactgacctaggcctgcgaccgggctcgggttgagggtgcgcttacgccgccgcaagccgcccagtcccgatcccgagaacctgacacacacccgagacagcttcctccggtgaagggcttgtccgcaagacctgaatcacctgaggtaaacgttgctcgtcacagctgccaattgtttccagcaggatctctagcagttcctgtttcccctcgcccttccatgagcttggcatcgagttcatgatggttgttggtgaaggacggtcctgggaatcagggccggcatggcttaaggtatcgtctgccaagtgtgtcggtgcgggtggggagaagggcgcagctgcataggtgttgatgtttgtgttggcagtgatgttggtgaaggggatagtagaataatgagacggggtttggtatatatgcgtttgcgggaattggttcggactcggattcggattcccgtatgcatcttgcccccaatgatgaaacgcatgaggcctgtcatattcatttcgtattgagtattcttccccgtaatgtggtactgttgatgtgagtatgggtgcgggatatccagtgtgttgtaagtatggtagtgcttctccgtcaagcatgtaattatcgctattgactccatatatcgacgggtagtgcatccctaacattgcatcctgcgcgtgtaacgcgtgcactgggagaccctgcatcggtactgagacggttccggtcatggcccccggagggtaggtcacgcctcctgtataacaatcgaacattgtcgtatcttctacagtatctgcctagagttagcataggcgccaaaaagaagtgaaacaagcaaaacatacttctacaagcaaggggttgaactgtaggcccatctagctccgcaatttgcggcggataccccgtcgcgataggataagccgaagtagaagtcgaccgcgacgaagcggatgtcgaccgagtcccattctcactccccgtactatcaggactcgtcacagtcatggagttcgtgatgatcgatgacgctggcgatgacccgcgccagctaccttcaccagtatccggggtacctccagccgaagcagaaccagcgccattgccatggccatggccatgaccatggttgtcgtagttgtgcgcaggcgcatgaggcccagccccttggcccgggcgctcgtgctggctctgggtatcacccggctctcgtgaaccccggttcaggcgctcccgcagctgtgaaacttcgcgtcgtagttggtttattatctcagattggctgatatgggcccgatcttcagccgttgttaggtaggtacattctgcttcgagaccgcggattatgcaggcgtggcatgggacggagcggtcgcactggtgataagagaaagtggttagtggcttgggaattaattaagaatccatgggtgtgagtagagataggaacagaggatccgggtaccttcactttgcgctcgcgacatctgaggcacgactgctgcgggcgtatctttgtcttggagtcgggcattgcggcaatgccactctacggtattgcaactccgtgcggtgaagatcaatccctcagagattcggagaatttgttgaagttgggttccactcaaagggtcccagttctccatgcagggtcagtcagctgttgccccgtattccagggaaatgtgatggatcgtatttcagatccatatttttctctctatgttttcctctgcactctgattgggtgcagttcgcaatcgcaattttcttctgaaggtaatcaagagatcggtaccttcgaggagctcttttgttgtatgcagagctatgctacttcatctgcaatgatcgaagtcgatatatgctactttattgaatatgttctatgttgatgttaccgtcgcaacgcttatcacgtcccccgcgattgccgtagatcgcagttcatggaaatacgacgtcggtgtggggaatccttgaaagggacctcgggacctcgggggctagtgagttagtgaaggaagtgaggcaatgagacagtgagctagtgagctactgagctactgaaggaagtggaccacgtgcgcgaagggagtatagggagtatgtgctacataccatcaaaccatagtcattacatcctttcccgtttcgcctatacttccctattgcgaagataacatgaagcccttcccgcccataagctggctaacccggagcatggcctcctgctgttcccactgctaccagtgcaagcctcgatagagaacccagtcttcgcccgagcacccagatggggtccaacaattgggtgtttcgagtgcaatctgaatgagacgcttgtcagcgaaacagcacaagcaatactgagccgcggcctcctccgataaaaagtatcatcattcatacattccgctctgtacattctgccctatacacaagataaccaaatccatcgttaaatacatacaaacaacaatttcaaactttcgaaagaaaccttgaaatgtctacccctgcaaagaaaatccaaccccctccccagtccccatctcaacaagattagccctcatcttctcaggcctctccccaagtccaaaagcagcatcatcacgacgaacccaagccccaaccccatgctgcagtaccgcagtagccctaaccttcttcttctcctcggcatcatcacccccatcctcactgtcagaagccttcaatccaagacttccatgcaaagtcagcctggtctcaaccccaccctcactctttccccgataaattccacgatgcaagatattactattataaaacactgcatctccaggctgcaattgaacaaccaattgatccggcaactcagccgcataaggatccgcatcacgctcgacctgcgtgcgtgcgcgtgcatgcgtccccggcacaacaatcagcgatgcatcggggcacagcgccaagttgtactggcaatgcgactgacggccgccaggcgccttagccgcaagctgggcaagttcttcctcggcggtggcgtgttcggagatatcgtcgcggtgccagcggagctcgaagtctttagtttcgggcgccacgagcagattgaacagttccatgacgaggggctcggtctcgctgctggcggcgttttcaacccccatgagctcctccgcgacggcgagaatcgtgggagagaaatagcatcgtgcgaagctgtcccgtcctggcatttcggggtgcattaggtgctgcacgccccagattccgccctccgaggcgggcggtacggttgtcggccagggtgggaattgttttgggacggtgcggaagtgcggccagcctccactgcgagtcatggttgtggcttttgtggcaatttcgtggtagtgcgctacctcggctggagtcaggagattgcggactaccacgaagccatcgcgtttgagggcgtctagatttggggtggacatggtaggaacgttgaaagaggaatgatttctggaattcgcaaaatatctggagatcttgaaatcaatatatatctgcgggggtggatatacacaatacgacgcaacagtgtcgcatctacttttctggggactcgatgctaccgtggatctccagatgtgacctttcccaaggttatcgttatcgatgtatatgtttttatctgctgtgtgtacatatgtagtatttgattctaataaataaacaaacaacttaacagcataacaacacaacaccataacaaactcatacattgtcttgttcctagacgtcatggggatcaacgccatggggatcaacgccaagaatagccaagagccagagggctgagtcctcccacagtgtgatgtcgcatttgatctttttctcttggattcctttgttcatacctctctagcttctgcttttttgcgatattccatattatctccttgaattccaagaaaaattcaaccttggtgcaaatttcacccccgccatgcccctccttcacgtgggctccgccctgctagtattgctcctgatactcccgcaagtacatgccttcggagctggaaatatcgcctctatctctgctgtagaaggcaagaactggcgccatggtgatatcgaagatgtcctcaagacgctggctttcatctccggtcacaaatggacctcgaccatgatcaagcgcgtgtattttggtaactggttgcgcgattagtgagttatcaaagaatccagtaaagatccaatatattcctaactgcttctgtagctcgcaggcaatggacgttggaactcttaaaaacctgcaagccgatacaatccgtgttttggtgtgggtcctctcgttcctgagcttcggttatgccacggctgaatttgaggtgactgcggagcgattgggtgtttaccgtcccgaggaacacatcgagtaagtccagcttgaggtatattgttggtgatttgtactgattgtcttcttctgcatagtaaccccaaggactatgccgataacgaagacgcacgtcaatatgacaagcggttgcgcccacccgttcgtgctattgagctcgaaatcgacccgaacaccggtatgaagaactacatcgccaatgagcgaggcgactgggccaccagcgcggcctttatcaagttcagtcttagccgcagtatccactatggacggacatacaccaatggcggacataagaagggcaacgaggaggacctgtgcgaagcactccggtgtctaggtcagggactgcacacgttggaggatttcgctgcacacaccaactacgttgagctggccttgcgcgagatgggtttcaacaacgtgtttccccatacgggtactgccactcagatcaaccttcaagggcatcacgttttcccgcttgtgacgggaacctttggtatggtcgatttcttccattccgtgatgggagaagcaaatgatcattttactcaatctgaggtcaacgagatggatattgcgctcggtgatgccgcagcaaatgcgcagtcgaacaattccctcaatgctttgactgggctcttgggcaaaatccccggtaccaaggatcttgtcagtgaggcagagagtctcaagaggtcgtcagaagcacaagaaatggccaaccggagccgtagtgctacaaccggctatgcgcagtcttccaatagtcacgagcgatcccgtgcgggcccaacgggcgatagttcgaagcctagttctgggctcaacgccatgcctgatttcaacccccaggagacagtagccaagatctatcccattctggcattccgagataaggtgatgcggagcttgaacgcaatcattgaaaagatcccaggcttggagtcactcgttgagaagatctccgagactctgaccgttgtcgtcatgtcgctcctagcgcctttcattcgacctttgatcaaagctgcttccaactccattcaaacaggatcagcaggcgtcattgatgcctctggcaagcaccagtacgaaccttggaccgatcctcactgcaccgaccccacccactccttgctctccaaggaccactttgccaacattctgaacgagcccgccggacgagtcgcctcttcaatcgtggagtacgtcgcgcctcgcgttctgtatgcttggcaacacaccgatgtccccgagagtgaagtcctcaatgattgcatgcaagtcttccaccacccagcgttgcgcaacatgcacattgatgcccatcgtgtaatgttcgagaccgtcgagaaatgggttcacagccgctcagaccgcggcgcttcccttaactccgtcctcagctccgagggcgtgagatccggccgtaatactggtggagtcagccacactcacagcgatggtcatagcgcatttgcggcattgggtggtgcctcgcacggccaaagccagagtcacaaccagagcagtaacaatggcggaaattcatctggtggattctcctcattcttcccccaacaaaaccagcaacaatcaaacagcagctcctccggcatgccctgggacaaactctccagcatccccggcttgtctggcctgagcaaattcgaaagtaaaatctccaacttcctccctggcggcttgtcacgcgatgcaaacgaccaaggaacccaacagagccaaaactcataccagggctaccaggtaggtggtgggcacgaagccatgcaaccttctccacagcagtacgaaaactaccaccagcctcagcatgtacctcaacatagtcaaggctaccagcataatcaacatcaggaacagcattatggtggctcgcagaatcatccgtcctatgtacagcaggatggccacttgggccacccgcagtcgcacgattctcacaatgccccgccatatggttcgcatccgggttcgcatccgggtccacatggtgggtttgggcagggccagggacatggacatgggcatggtcatggtcatggtcatccgggttactgaggattagatgataagacgaagataaatgattgcgtgaatatgtcgagatcaagtgcagatgaattgaaatgattgtgattgtatttcatcgggtggttgtttgtgccgatttatgaggtagtggagtttggaaacacgataaaggtgaaggatttagggaacttggaagttgtactttcttttataaagcatatgaaacggacattgagtcacctgggctttctttggatttacatgagctgttgtgattccgcgcggtatcgcttagtcttaggagtccaacacgtgcggtttacctacgtatgggttcatatcaatagctcaatagctctgtttacttggtttcttgcctctatttcataaagccttggcttgtttcaatgaaatatacaggatgcagatgaccacaaatactttcaaaggctcagctgtgagttgtactgtaagttattgttcttataggaggtgagcaaagggggctgttggttcctaaagtatgcatttgatatggaaatagatgctgttagcaacgtaagattgatacaagatagactcccttatgattcgcagtgtttgagtattacaagtcccttttcggctctctggtatatttatattggctgtcttgtgaattttggctcttctatagctatatcccttgtcagatgcgtttgtcactttctctacttggctaggtattcatcattcagaaaaggtctttacatttgccgcaaggctttgttaggtattctgggccttgtccaacaaagggcagagccaactaaccctttaacaataacaatgagaatagcattcattatacgacttaacataaagaaacctttcaattcctttgacttattcttatctctcgggtctacacctggactctccggggctatataagcccttctctcctcgcgtcaacaaccggaatttgccaacattgtcctattctacacttccgaggtcggatattcaatccaataccaaataaaacccaactgtgtgagtcttgcagcccatatattatcatggcatctgacgagctttccgagcttcttcacaggtgggaacgggttgcagtactctgcgacgcaccccaggcatctgtgcagtgctatattggccgagaacacagcacttcctggataatgactgtagttaacgagtggatcaacgagaaccaccttatctggaccctatgcgccgccctcgccgattccggcctcgaccaagagtggacacgcagatttgacctctattaccgcagggagtggcgtcggatccagttgatggtgcaggtgacccagggtgctgagcggttgctgctagatattcgacccccgcctatgctgctcgctgtgtttgcccaccacaatgggtctacggcccgataccacgccatcatgtccacgcctgctcgtactcgagccgacggaggccttctgaatctgttgcggcatgtatatcatggaggcatttcctcaactgatgtcttcgatgtagtcctctgtggagagggtatgactggaatcgcgccggagtcgcctccgtactctgctctcgggttgccagaccattccatcccagttttgaacctccctcctccatatgagaacactcccgggtctgactggtcagagctcttttctgagcgctatcccactccgcctcctccctaccgcggtacttctcccgctccccctggttggactccaccatcctaatgatggcgtgtagcaggtgccttgcttgttggagggttggagcattatctgagcttatcatgagataggtagcttactctacatagaacgttttcttagttctgtctcttttatcagaatgaatacgagtggttttttttttgccaattctctatgtatacgtatagtatagtaagccatagctatgatagcgagattgaatacctttttgagcagtttatatgagaattctcaaagtttagaacattatatatctctatgcataagaaagtgcacgaactaattttgagttcaagctgtacttataggaacaaatatagggcaagaagacgaatgtcacaaactttatctgagagtatattgctttaatatccaaaaataatccaaggctatgtaggctggtcgcctatgccaaaaatagcgggatccaataatcgtgtgtagatcaagcggtgatagtatctccaacaagcaatgatcgagggtcagtggaaggcctaagtttgtcgagtgcatcaacccttgcagtgtaagactttgtttcaacggcaatggcttatcattcgataatctggggatctaaatacgtttgtccagctgattacaataactacaatgtaagtctacgtcaacattcagtcatgctcctattcttatgtgtcagtttctcgtgttcgtgtctcagttgaactttccaacatgtatatgtacagggaagaagtataagagagtcgtcaacaccatcaggatacgcttcaacagcaaacattagtccgacaaaattaaaatgaagaacatgtcaatttgcgctctcatcttggcgactgccacctccatcctcgctgcacccagcgctgtggtgcccgtcctagagccactgcaacttacaaatctcaacgcagccatctacagcacaagccccccgcaaacctgcttcctctcttttgctgtcaaagacccaaacacgaatacagacaccaactgctccgcttactggtatgttccagtctatatcccaactttcttctctatctttaggatgccctacaagatcaaagcaaaaaggaaatgaaggatactgacttttagataggtccattggaatggctggaaataagacctacgactgctccgacaaggcataccagctccacctcccaaatggaatctatgatattgaaaacatcgatttcggagtttcccgcgcagacggctctgagactgggcggtcagttgtgactggcgacctgtggaaatgcgagaagcaggagtatcctaaggcacagtgcaagtgggatggtattttcagtctcgatgtgacttcgtctgcttgagtgagggtttgcgcgtatgtgaggagagaaggcagtattgctactagggctatatatgtggagatgctattttgcttccttgtttcagtctatttggtctaattggcatttatctcttgcgttgttgcttctaaatatactttaatctgttcttatttccgatctgagacactctgtagtgtagctggcataaatctaggaacagcctcgaaataccccgggctattcatgagaggaaaacaccaggtgaactaattaaaagtcctatatcctatatcgagaaattgaacactcagacttttatatcgttggaggtcaagtccaggccaatctggaaaaaccctgctgactcatcttacccacttcgggtgcccatgaggtcagacgcgtgaggtctcggcgctacaccaaaaaatgtggtcttgaattccgtcgatctttgcaatcaagcggattcttctgctcatagtctcgataggcttatccctgatgaaaaagcttgatgattcagcagcgattgccccctcataatgaccgataaggctcctcgacacctataaggagtagtattacgatattactttatggacgacgctacttgcccacggggcgcaaaagggcggagctcttgcgatctatgtcgccaccgaaaggtaatatccacaatgcctgtgtgcgtccttaatctgattttgccgacagatccgctgtgatagaaatcaaccagcctgtgagaattgccatcttgcaggactaccatgtacattctctcggcctccatcccagcatcggaaaagtacccgacagtaagactctatatcattgaacccttctttaccaggcgcttacggtacgcagagagcttgccgataccaaagctcgggttcgggaattagaggccttgctcggacttaaaggatccacaaaacaaagccacaaagcgctagctatcccttctccgagcagaagctcttctccagcttcgcctagatccctctcggaagcatctttatcttatttgcccgatactcgtgattttgataccgcgttggcagctttccagtggcacatctcgtattgtgggcttgggggtgctctttcgacgcaaagggcagctttttcctctcttgttcaagagcagacaggctgtactttcaatgtggatgttttttctcatgaggtcactcaatctttcaattcacaacagctcaagtcgacaaagaaagtgattgggatcaaatggccagattctgctctagtccaacggtgtttggaatattttgatagaaatggtctctattctatatttccagttatcgatgttgaggccgtacaggttctactcaatgcaagggtcttagaccggcctccaaacatgactcgggcttcgaatcgggcttgtctagctgcttttgcggcaatgatcacccagatccaccgccatgagcgggctttcgcaggcactgacccggatgcttatttgcaagcagcgttaactctccttcctgaaatgctactggagccccctgatctacggaccttggaagcggtgacaatactagtaggttcctcgcatgtccagccccgagagtggatcccatgtcccagaagcttatatgtggccatagatgctctatatcgcccctcttggcagacctcaggcagcagagctacttcttgggattgcagtgcagcttatctataaccttggggcaaacagaatacaaacccccaatgaggtacacaggacagaccagcgtagccaacatcttcgagctctattctggcattgctatgctgtcgacaaagaattctctatccgaaaatcccaaccacccttgataaacgatgccgattgcgatctagatctgcccacgacatacgcccaggaaacctcagaacgtcacttctacatgaagcccttgtcatccaaggagcttcttttcccctcggacctccgcttttctgtgctcaagtccaagatcttccggttactttattcggtgcacagtcaaacactaccagaagctagacgcattcagcatatccgcgaactagaccaagaactgaacgacttgaacctgggttatcctgccggctgccggccggaggtgttcgccaccgagagcgcaccggactatctgtttcatgatctcactctccgcggtgtgaatatccatttggaatattactactgcctcggaaaaatccacggagcgagtagctcttgcaaggtaccttcgcagagctggtcgcctctcccatctagtgcagagctgtgctttgaagctgcaaggtgctcgctgatctacatttggcgagtccgccaattggtcaaccagcatacgttctggtaagggacttcgaaccttgtcacaggtatagatactaatccaggtctctttcgtattctaggcttcacgcgcaatttctcctcacggccgttttctcggtcttctggtatctcatcacggccccaaattcatctactttcacaagggatctcaagaccctggaggatatcgctgagctcttagctcacctcgacagatcgaccgatgacgggcagacttacccgccgttctatttggcacaggcttttgttgagaggctggtctcgcttgcacggcagtcgcggcctagggttgagggcacatgatagggttgctcaatactttcggttacttttctcttgaaggtagtagctttgtatatatacgaataaatgctattacactctgtggctttgggtttgataaacaaataaatgaagttccggcaacatgaggatttcccattcttcaaaatcttgattacaggcatctacatagcgtgctaagacctcgagctgagaatttgctcatctgagacacctcgacttccgaggttgagtcggaggttgacattcaggaaagtggagacctcgggcatattacttagcgttatctgtcaggcggtgagcctccggagtattgtaaattacctcattggcccgtcccggtactagcgcatacacggcggtatctctcgcatccgacggtgcttacgttgacagttggactaacctcaacgggaataacggcgatgcagatgaacttaaaatcttcaccgtaccccagtactccggagtgaaaagaaaagtgaaaaaaaagtcaaagcaactctctctctctcgcacaatcttctatgccactttgacgatgtaggtatctctacagtcttcatctctcctccgtccgatttataatccaaatgaagcggaaaagatcctacgataccagccaccgccactggagggctcaccgcatgacacctcaccgctgccacataatccacttgaactcgagagcctagttacccagcgcaatggttacttaccgataagcggatcagctgaaggatctgttcacacctccttatggagtacgaagtactccatccctattcccccattgcttcttgatgtggaaattatgtgggtcgacacgaccctcagcttcaacttccagccgcaaacatggatatcaggtgatcgtcgggcatgagtctcggtgagtttggttcgttaccaggcgaaccagtttcggacctatccccagaaggattaacgatggggccaaaatctgatgtagtggatcgcggtgctacgccagccactgcaccgggcaaccgggcaaccgctagatgggagcttgtgggcctcgcgccttttttctgcagagctcacacgagggttgcttcagacgatcctgtggtgatcaagtacgaagtaattgttcgaaatccaatgtgcgcttgacatccgtctgcgatacagaactattctgtatatcccgaaagagaaggaagtccttgaatcgaacacaatgactcgtgctgtaggtctcaaagctctcgaagacagcttcgattgcggcgttgccgattctcgagacccacacagatgttttgccaaaatacggagtggactattgttttttttctttttctttttcacaacatactatgtacggtcacgcttctagctctccggcatctgggcccggcaagccatttggatgatttggcaattcttagcgcagctgaaaaagtgagtcgcagctgaaaaagtgagtaggtcggaaacagaatatataaagagcccaacgcttccccttaattcttgaatcacgcctctcactcatatttgttttatgctcgatgctcttacgacaatcatgcgcggaatatctttaatcggtctgattcttttcctgcgccctcacctcgcgtacacggagaaggtcccagtgaaaagcattggtaccagcttcaccatcaatggagacaaattgacatggcctgatggtcctttcacgggaagcttgacctgcactggccccactaaggtcctcagcctgagttcttgccagcggtacggcacctgctgtcctcccggcaccacccttaagggttccccggataccgaatggcattgctgtggcaagggtcacgatgtgaccggctctaagaatgtgggctatgagtgctgtctgtggggttccaccttcgacggcaacagctgccagagagaggaggtgtgccacaacggcaagcatttgatcggtgggaaatgccagtgcccctctggtcacgaagaggctgccgatggcacttgcaagcctgcgaggtgtcaatcaggcattgaaagtggtatgtcaaccctcttaactttttttttctttctagggcaacacaattaacaaatgtgcaggcaaatgctacttcctcaagggacgatccggcaattatttgacattcaacaaccaatactccgaactcgaattgaacccctatgtcagacccagcaagttccaattctgccgaaacgaaaaatgcactcctggcctgcctatcaaccccacccacgagttctacatgaaggacctccacggcttgctgccagaagcaaccgacgccggactgtggatcgacaacacaaacaacggcggttacattggcaagacttacgactttgccaatgctggaaacttcttgattaccaagtggcccggcggcagatattgtctcactggattctccgagggactcgcgcaggcttatcctgatgtccttcctggcctcagcttcaatagccgtgccccggatgcgtgcattgaattcgagctcaccgaggtgccttgcaacatcagggatgatgcgaacaactgcatctggggaaatggtgaacggtgtggccccaagcccgtgcatcattctgtagtttaagaagatgcatctgtgtcactctttccttggttatttttacgtctaccaatgttcttcctatgcctgagttattaagttgagaggttttgtcggaattttctttctgccgtgttcgaatattgttatgctacacttgtatcttagcaatcagcgtttgtattttattttattgcatacaaatgactatgataagcatctttagtagtctatcagttcgagtaaattgaaatcttccatcagtacggaatatagtatcaaaaattgcattgccgaactccaggtatatattgcggcctagtgctattaatttccccgaaactcacaaaagcgaataaatatcacatacgaagtatcaagaaataagaaaaagtccacaagtaccagaccattattgttatattccaattaaagtatagtgcggcgcagtaacgcgcggcgaccaggttcttatacacagtaggagtattgggatggccaatttagattaacctgcgctattaaaccaagacatacataatagtgtgtatttatagatcgggtcaatatgtgctcgtagctctagacctcaaatctacaaatgtggcttcgtgtaagtaccttcgtgctatctggcttttccaccaatccctgtcgtcaaagtatacatctgctttcccctcttttcccttacatattcctattcgctttgtcttttcttcctccttctctttctcttcatcgttctctctttcatatgtgactgcaattatttgcctctaagtgacaggccacttcctaaatgaccggatactataaacctgagacactccgggttcaaccgcgacttacctggacgttgactccgattgggggaataatacgatcctagttgccctatgatacactagtttaccccaatcttcaacagcccggccgggctagctcaatcggtagagcgtaagactcttaatcttaaggctgcgggttcgacccccgcgttcggctattcctaaaaccaaacctgagatttcttttttgctcttttctttttcggttctatttatagaagagcacgtcaagatacatagtatcgacattttaaagttttgctatgcccgttgacggatggggtagagtattgttggtatctggtttgtttaatcccgcgtaacaggtatcgaagaaaatatatctatcgtttattgatgcaactagagccgtttatctctgtcaactatgtacaacacggccccacaccaagacaactcaatcatcagtcatatcgctacaaggtataaataaaggcccgaaacctctgcgcatcgggaaatgtaacgccccaaattacaccaaaacacaatttcacaacttcgttccctcgcgtccaccgtcactgggacgcctgggccgaagaggccctgaagagtggccggtagcatggctcggcccagccgctgacgatgccatctgggtccgtgttccttcgttttctgtagaattggtgcgaacagcccgtgtcccctggtgaagacgagggttcatgagccactggacttgcatgcgcacactgttgaccgccgcattcgtgtgggctatgtcttccttcatgcgtagacattcattcatgatagccatgctggcgcgagcatctaggtctgtgatagcatgcgaaagttggttgacctcctctcggagagattcgtgcagtgaaagcaggtaggtcgtggcattggatgaaaatacactcgctgcaatgtctgcaggatcatcggtatggacgtcaacacgagtggaggattgctgttctcggccagattgggtagactgtccaccgctttgactgttcgcaaagcgcgtggattcgacaagagtggaccgaatgttggcgagtccatcctcgaatatctcattccgctgctgcaaatgtcgcatgcttgattcaagggaattgagccgggtattctgcatctcaaagtatgggcccattgcgactatgggacagctttgctcgtgtgctgcaatgtctgcccgtcggatcttaactggacatgcgtatttggatgcggcgcaaggaaccgcaacctccggacatgattcaatgtgttcccgtagcgcccccctagtgacaactgtctggcagtcggcacatgtgacctcaagaactggacaaagctctttctcatgctcctaggcgtttctagtcagcatctatataatttctaagaggttaaaaatgaaacaaacctcgtattcatgctctagaatatcctgttcgcaataagagcaccgtcgcactctatgaatacacttctgatccatcccaacgtccttgcttcgcgtcatctgatcgcatgaattatccggacacggcaatagccggtaaccacagtacttctcgacatgcgactggacatggcctcggggaatgatctcttgacatccctccgttatcaatggacatcgcactcggatctcgtcgcacatgttgatcagcaggcggggcacgctagttgacactacatgagtgggattccggcaagaaggacacgggaagtcgtctgagtcggtcgagcggaacgtggtgatggccgaactgaggcagctcccgcagaagacatggtcgcattgtagacgaacgggttcaacgaagggacagtggcagatcgggcacataagatgcgggtcgtactcggagacgagatcaaggctgcggaggtcgattagctcgtcgcagttgcggctttcctccatggctataaagtcttgtagattcatgttgtgcgaattccaagcctatcacgggggtcccaagaaaatatgcaaggtaccaacggacttaaattccctatgttgttgcttctttggaatgcggaatcagtgcgcggattcagttttgcgctagataccgaggtagatcgaagagtctgaatccattaggatgacactcagaaaacaaccaggtcagcgatcagagccatatgcctgcaagacatagacatgttaagattgaactgaagagaaggcgggatgactgcgggggatcaaggagaggcaaaaggcggaaagcggttgatccgcactcgttgccgcctattcctcgttttaccatctccactttcaacctcataaacatctcaaacagtctgactttatcttgcttggctgatcggaggtctttctccgtacggaccgtacaaacgcccacgatttatacatctcaacaggctgggatcccacacgtctcatcatgacgaacccttcccagctcttcctactcgccgatcacatcaaattatcccttttggagcgcgaaagagcaatctcactcgatctcgagcctaattcccaagatggagagatctcttggtctctcgagtccctccgagaaagcatagaggcactggaagccgaacaaacccggctagcaaactcgcacgacagcgcaggcgccgccgccctgaaagaccaactcacccctctccaagcccaatataaagacctgtcgatccagttttacggcgcagatggcgagccatcgagcaccaacacgacgcaggcgtcaaatcccgctacccccgatctcaagcagccaattccccaacatccaccttccaaatccgtccgcttcatggacagctccgcagcagcggcagccgtgcaagatgagattgacgaggaagacgagcgcaaccgcagcaacctcttccgtccataccgcgatgagccatcgccgcgactggatcactccaacatggacaacctgcagatttacgaccatcacgctcaaaccatgcgcgaccaggatgaccagttggatcggctgggtgaatcaattggcaggcaacatcagctgagtattcagattggagatgagctggatggccatattcaacttctggatggaatggatggggacgtcgagcgtcaacagacccgactgaacggtgcgagacggcggatagataagatccgtcgaaaggcgagcgagaactggagcatgatgactatcattggattgatcattattctggtcatcttgattgtgattctgaaatgatacccgatccgggtggttaatttggatggctgttcttttgtcgctattactcttttacattttttctttctttttggcgagcgggcgtttgcaactttacgcaatgcgggacgattgattctcctgatgtcttttcacagtggctcgaggcattataaagcaattgactcacttctagactcctggttggattcttgatcataatacatctacaacccttacccttgatcataacctttatttcatatccaattatctgtgagacagaccaagtgtgaacattctcattgaatgcgataaactcttaacagctcgactccaacagcctcacctgtagactgccccaataaaatacacgtgaaataaacgagggccgtgatcgaaaagttccaaaatgccgataactttcacttaatgagcgcccttctggctccgttgcttcgcctccttcgcctccttctgcgcctcctggaaagtaggatcggcatctaactcaccgcgatccgctttgacctgaatgaatccagtatattaggtctgatgaaagatgaaatctaggggctggtacttacctctgcctcgctgttactggccagctcgaatttccactttccactgccatccttgttgttcttgaggccttcttgcttatgggattcgtagtggtgggagagatcatcgcggcctgcttgtggttagtacagacgggagaagctggtgatagtggtgtactgacccctatcatcctctttcaagctccggactgctgaggaatggaacgtagaagctggaacggccaagtttgtccggataacttggcgagatgaggcacggaaggaggtaaggaatgacatgatgtaggtgagatgagtttagatggaatggtaagagtaagtggaagacaagatagatttgggatatatggaggaaagggatttgaaatcaagtaattggaactctcttccgggcagacgggacatttaagagcatctggttcggccaaggtgacagctcctgatgctatatgacatcatcgagttggtgggtcagttatgtcaaaacaaggacatgtgaacgcatgtacaagataatatcagttgaggcgattccttctgagatagatatctgaagatctggagctttggagctttgccatactccgttggtgcgggttgttcttgtagacatttctacatctatagaatctccccgcataaagatgtggagaccttccgacctctaacttgatcttgattttggaatagtcatagtcgccaatatgattcgaaggctttagtcaaaccgacttgactatcttaggtatagtttcctaatcgtgagacgggagccccggagtagcgaagaagattcgggaccacagatgtgatccagatgcgggaaatacttcctcactgtcgatccttagtgccaagtttccttcggcaattatggtcgctcatattcggccaacttgattcccgtccatacttgaaaatatcggaatacatggatgttggattgtttgttgggatagtggtcgtgagcgaagtaccgatgtggcagcattggaggacgcactgacagtaggagatgtcaagagtaggagatgtcattctcgacccacctattattgtctggcaagaaacttacaatctatctctctgtgattggtacatgcgtataatgcctctaccacttctttgctttcctgaaatattgaataccaatgtacatttttctagacgggtttacgtggactgtgacaagaaaattaagtctttcagctattgcaagctacctaaaccatgatagatctaagtcagcgcattttctaggactgacaatataaccgctgttttttcagaacttcagtagtgctgacccttttgcgaatgaggtcgagctaatcgtcttcattctgtggaatggagaaactctttgtgtaaatcaatagatcttaaagccaatagaacgtgtgcaagggactctctccgtcaccttcaagggaaggagatatcgaaatccagagcataatctgatagcacatagtctggagtggctagacccgggctttgtggaatcatgattgaagcgacagggaaccctacatgtagatatctgggttagccatattttgagggacaattggtagttgagaaggagtgattgacgtggctgaaccacttcgttgggctgcgcatgacgtgacctgttcatcctgggggcgacaagtgaccgcgataacggtcgatatcctttatcacccctgagaacaacatagttctagatctgactatagagagaagtctatggaggtgtcaaggcgcgtggtgcgtggtatatggtgcatgatggagattgaagacttcagaaagctacatgtaagttgcagagctatgaaacctgacatagcgaagtgctgggtaagccactccaatttggtgatttagaacaatacgagcctcagttgaaccaaatgcgaatacctatatatactccccgacaccttgctgctttaaaaaaacactttcttgtttataattgtgttgtcaataggctgccgtaggttgtttgatgtttcaatcgttgctttattcccaacaaagatggggggattaggtggtgcatcaataccagacgtctcataggattggccttagtcctcagcgaacttcagcggaagacctgcctaggccgtagtgttgtgttttgaccactagttaaatatttcacaggtattcctatgcttcatctaatataagtctactgggaaatagttcattgaggaaaatgaacaatctatattctggtatttcatatcactctatcaatcatgcaacttaaccaaagacaaataagcagctaaatcacggacaaatatatgcagctccataaatcacaaacagctaacaagatcgagttatatacgcggcgaagacaattgaacagaccgggggacggttgaatggacgcacaagattcctaatgtttatgcctgtctccaagctttgtcttcaatatcaaatcgtatctgcataatagacctcttccagacaaatattctggtgatacgatgtgtacctctggggaatgctgacaaaacaatagcagccactcctttcccaagctctgtgcctagaatggccttatattcgggggtatcgaaatcccaggccacttgctttactgatgctggagatagcaaaaactctcgggaattaggtggttgagttttagcccaaattgtttgtataaagtccttggtgtccgcattgacaacattctcgagatagatatgtctcaaggtagtccgggcgaagtgaatatcgtactgtgcaagggcgacttgactccaccaaggtccatcgtatctctcaacatttctaacgataatcactcctattgcagtcgaaaaatgatgaaagttagttccgtgttttcttattgggtgctcaatggtcgatctctttgagatcttgacatcgtggtaatcttcattacctacagggaggccacacctttcgaggtcatcttgaagggcggggggtcttgcggcccagtggtcgaagtctactttccatcttttgctccgcggtttagcacgggttaagcttctgtattcgaaatctggtgcctgaactgtgcaattgggctcgtctgcatcatcgatccatctttgtcgcaaatctccccacatctcacgcctgccatactgataaatgtttaggtcaacggataaggagcgaacttgcgagggtgggacaatgggattattggcagagaaggcagggtcttgtagatctatcggggcatcgccaggagagaatttgcggcggcggcagataccgaaacaactcaagagacaacaattcgacatctctatgagtatattagattgaattaaaatgtataaaactagagtatcttgagtggtgtattgaatgatgaactcttacttgtctgtatgataccgatagaggcttatatagatgtgagttaaatatatggcgcatactcgaccgtgagtatcgcgttcaagaatatacaaaggggacaacaagaggacaggaagaagaaacatcgttcacaaagagtcgacaaaaatactagcactcgaacaagacagacaatgataatggaagctgagaccaagccccaaatagacactaagaagtggacaaagaaattgagccaaaaacacagagaacaaggagcacaacaagtgtgatgggaatagcaattagacggactattgtcaacaaagagaacattgtcgtagaccaacaaaagagcgtggataaagaagttaaaatgcaagcatacatgtctcgatctccaatactgaaggccaactaggttaaaattcgagatcggcattctcaggccgaaagatgatcattatatagcccggtatatactctgttccaaccttatcgctgtgatatggacttggctgcaaacttatatccatccgctattgctgcctataaccttgcatgcctgttgacttgtatcagacttctgtatctcatttggaagatgtcgaattgcgggataaaatcattcgaatcaaacatgtgcatggttattcaggttgttagcatcttgtgctctaggtttatgaacctatcgcgggaactttagttattctatggagcactacccctgaactagatttaacgtcagcgggtacttctgcagggccatttctccgaggcttctcctgtgcccatacgcatctaagaggaaaggggaaatgacactgccaatcattgccaacgcacatgtgcattagcgtatattgtagtacctaccgtgtattcttggtggggaacttggtattaaaactcgtagatctacctagaattatccatatttagtaggatttagttatgccacggggaaggttaacttggcaagaaccgggtagtgatatataactattttccaaatcaccttagaaatcctattaattgctttagtatatatcgcactgaacagccgaggcatcttttcaaatgaagaccatcttcctaagtgttctcctgccggcattagccaaagcgacggcaacaagtggtaaattcactgcgctgagcttcaacgtcgcaggtctgccatcactcttccaatccaacgatgtcaatggcacaaagagcgaaaatgccaagcagctcggcaattacttctcagagtatggctacgagatcatccatatgcaggaggtattgctccatcgagtcttccatatatcaataatctaacaacgctctaggatttcaactatcatgcctacatctatgaaacagataaccacacctaccggaccgctacatctgggggtgcagccatcggaagcggcctgaacaccatttctaaccacgactgggtagatttcggacgtgtgaaatggaacaagtgctccgatgcatcgggctcagactgtctgaccccgaagggcttcacattcatgcgctggaacccggccgatggagtctatgtcgacttttacaacgtccatgccgacgccgggtgagtaaaagccattctcacattttaatcgatccaaggactgacctccgtcaagaatcgaggatgaagatgaaactgcccgaaactccaacttgcagcaagtcgcagattacatcgacacttggtcgactggtaatgcagtggtagtcatgggcgatacgaacagtcgatacacgcgcgccgatgatacgggcatccgcgtcttcaagtctcagaatagcctcacagacccctgggtcgagcttgagaaggatggtgtctaccccacggttggagcagatgccttgctatgcaataacccgtcttctgtgaagacctgcgagacggttgataaagtgctgtaccgaggatccgaagttgtgacgctcaaggcagacagcttcatctatgacggtgggaagttcacaaacaccgattccgaatatctgggcgatgttctctcggaccacaacccaattcttgtgaacttcacctggtcgctttcgtcatcgctgcgacaaagtcagttctctggaggtccgcatggggtgtggtttaatgatctgccgagtattccttcatcgcctgctgtttctgtgattactttctctggtgcggaaaggctggatgccgttgctttagagttgaaggatggcacatcgttcagccatggaggaactggtggcactaaggtctcccttgcactagactctggggagcattggacggagactaagctctgtactgggcagtatgatagccacactcgcaacttttatatcaaggctactaccagtactggtagaaccttggaggcaggcacctcaactgataattgccagacatttactgtctccgatggctttgcagtggcgggtttcatgggacaagccgaggacgagatcgatcaattggctttggtatatgcggcctactaaggaccaaggaaaacgattattccagatacgaatctgaatatgcagttgtttatttgccattttggtcaatcgtatcagatcatttatgcagtgtatgtcccaaacgccgaggtattccgtagaacccttatccatatgcaccgcgctgtgtaaataagccaacaaaaacgagcactttaatcaatcatatcctctggaagaacatcatccgggttctccccaaccgcttgtccgaccaagcgcacgacgcgcttgattgccttggacgcaggactgtcagggaagttatccacaaaactctcaccaaagtcgcacgccatgccaacgcggggatccagaggcacggcacctaggaaaggaatgcccattttcttcgccagccggcgaccgccgccagttgtcgctcgaaatatctgcgactcatgcgtgcagttaggacagacaaatccagacatattttccaccaagcccaacaccttaatgccagccttgcggcagaagtcgacctccttgcgaacatccagcaatgagacttcctgcggggttgtcacaacaacggcaccgtcaacgccagactccttcagcaaagagttgacggacagatgttcgtcagaggtcccaggaggcgtgtcgacaataagatagtccagctcgccccagtccacatccttgaggaattgcttgatcagtccgttctttttgggcccacgccagatcaccgcgtcgtcacggttgggcagcatgaattgaacgctcatcgcgcccaggttatccgtcacccatacgggactccagccggcattgctgatgtgaatagtctctgactccacgcccatcatcttagggatcgacggaccacagatatcggtgtccataatgccgacggtagagtctggatttgcggcgaaggcgtgcgcaagaagggtcgagaacgtagatttgccaactcccccctttcctgagagtactaggatcttgtgtcgtatttgggagagtcgttcggtgatgatcggaatgtcggggtcgggacctttaggcgcggtggcgcagatctgttggttcgggcaaccggcacaagcatcgccttggccagcttgctcggattcagggcctgggcagtgttctgtggagagttagtgtgtgtattgcggcaatggatttagagcatgcgtacctggttcgggagcgacgaggctgggcgtcactttggacgacactgcaagggattcctcatactcctccaagtagggcgccattttggattgctactctatgtggcaattgaaatgagagcaagcgcggaaaataagaagataattgttacgccgttgcaagaaacagataaattcgacgtccggtggcggattgatgcttgataagcggagatgactaaaaccccactgcgattggcggggcaaggcacatctgcggtgtcggagtgtgaaatatctcatgttacatattgatatattgatcgccatagctgaagctataaagtactggggggaataaggcattttaaagaactagcttctgatgatacataattagttgactatctcttatgtccacttgccaagccgaccagatctgtataggatacgagattacttgatcgggctcgcatcactcctttcagcgcaagaaggtcaatatttatctgccttccttcctgcttctcttagggggtttgtttgagcgcagacccggtcgtgttgaaaagaacctcagcgctagccaaatctacagacacaagtttcagagcgatagtcgcaaacacttcagactcatgtgcttctttcctctaagattcgaactcggcttttttgcttctgcagcatcgacatgtgcttgattcatatgataatcaggatttgagacaaattttccctgcttagtctggacaattgcgcgatattgttcgatataaacacagagtaaccagctcagattgcagctcaactatctaataacacgcattgaagactgatttccagttctatccgagcaggcggtcgatgttgcagtcttacgatatttcaagccttgtttgaagcagctcttcgcatctccaacatgcctagcaactggtcggactttcgctttctcattttccagaatttctgtttctccacagatgtagacccggtcatcggatccctcgcggacaaagcactcattccgctcatcgaggaggccgaaagcggtattcttccgtaactcatacacactctgtacctcgtggacatatctaaatagtccgtagggttaaagaatttcgggcctatcagaacctaatggccagagtcttgatctagcgcttccactgcagtatgatggacgtggctcagcgcaaaagattgcatccagcatgctcctaggacaggctgcaacttggattagattatcccccgttgtatatcgcgtagtacatacaacccagtgagataagtaagcagtgcactattatgagtacccgttatcaatctcgaacaacggcaacaaggggtttcaattctcgcctggacaacaaccaggaatttggattggatgaggccaagtacccactggccgtggatgatctcattcgcccgtggaacttgcagacacgatcacaatgcattttatatacgagcttgggctcaaagggaaatgcgcatctcaatctaagcaggcggtaggtgtacaccggtatgtgcacagtgctactcggacaactcgtacagctcgtacaacctgccgcacttgccgcactgcacgataccccgctgttgatcggtgttgtatactacccatgggcaagagaggaatggatagacagaagacgtggtgtagctaaaagcctattcaaaatcgaatcagacgagacctttcccaacaactgtactttatcgcgaagaaaccgactaagaccacttagcgttggttgatttaaagggccccatttctttcccattccgctccattcggaggcccgcatctctcgagagacttcacgagtctcaacggttccactcttttgtcgggattggtataaataagaactggtctcctcggtaaatctttctccttgtctttcttgagaaaaacaaacaaaagagagacctcccattgtccggaccaaacccctggacaacaaaggtgtttccgttccccccccccccaactgactaagcatagttccgcttttcgattatcacatgcttctgccgtcacattcggcctcaacagttttctctctctcaacacccttgtagagtggaacaccatggatcaaggcctttcaacaggggcccatcaagaaattgatgggttacgtgagagaaatacacgcgtcgattcaacaatcggtcgcgaggctttaacagcctttggggaagtgcagatcaatgataaagatggcaaagaattgaagacctttgggagaactcccgatggaacaggtaagcttgttatgtattaatcatgtttgtattcgaaggtcttaatcggatgcacctaaacctcccgttgtatttcatcgagcccgctgctaactggatccgatgtatcagtgtttacggtccctcggactcatgacatggtctcccagttgcttttgccgtccgagccaaagaatttcggtgatcttgtggtattgattctattggcgggtcatattctgtttctctgggcacttcccaagggtgccaaaatcccggtctttgccgccacctacctcttctggcgcctggcctacaatgcaggaattgggtggctgcttcacaatcagtcgcaccacaagacactaattcgatgggccgagaagaccaaagtgtttgtcaatccagccactgggaagaaccctcaccctaaattgtataattggatcaaacgggaattggagaccaagatcccgcaggattactcgttcgacaatgctccaattgaatacaacacctggcttgtttttagacgtcttgtggacttgatcctcatgtgtgacttcacttcttactgccttttcgcgatagcttgtggtcaccaacccgttgacgagagtattctcatgacggttctccgatggtccgcaggtattgtactagtgctgtttaacctctgggtcaaactagatgcgcatcgggtggtcaaggactatgcctggtattggggtgatttcttctacctcattgaccaagaattgaccttcgatggcgtgttcgaaatggcacctcatcccatgtactcggttggttatgcaggctactacggaatctctctgatggcagccagctataaagtgctgcttatctcgatcattgcccatgcagcacaattcattttcctcgtccttgtggagaacccgcacatcgacaagacttataacccgccaccacccagaaagcgctctactacctgtgcggattcttccacattgcccaccgatctagacactccgacagcgccaactccatctgaagaccagactcccaacgcgacatcttcgtattcggccaagccgccgcagtccgttcacaacctcctcggactgcacaacctggatttgtatagaaccactgattcatcaatcatgctggttcaacttcttgtattctctattacagctttgacaccctctacaccagggtatcagttactgttcgtggtcctcgctgccgcttccagaatctggtattccgtaggcattgggtatatccttcggaaccaatccaattccaagtcttggacaaggcacttcgtcaagtatggtgacacgccgcaggaagcgtggaaccaatggaagggtacttatcatctcagtatgatcttgtgttactctagctttattgctgccgtgtggaagatgtatacattcccggccgattggaactatggtctggttctgttccgacatgtgctcggagctggcctaatcagtctgcaaatctggacttccgtcagtatccatgagtctctcggtgaatttggctggttctacggggacttcttcttcgatgactctccaaagctcacctacaacggcatttatcgcttcctcaacaacccagagcgcgttctaggtcttgcaggcgtgtggggtgctgttctcatcaccagtagcggagccatcgttttcctcgccttgctgagccacatcctgagtctggccttcattcaattcgtcgaacgccctcacatgcagaagctgtacggtcgtagccttcgccaggatgcgggtctcgttaagagtctgaagcggtccctgccaccctctctcaagcaattacacggaagtgttgacaagatgttcgatgactcctttgagttcatcgaggagatgcttgacaatgcccggcccaaactagccgcgggagtgaacacctttgttaaagataccactgcgctcttccagaagtaccctgctcgcgttaccatctcccgaattgatgcagacctggctggattcgacgcccgcgattattctctgtcggttgaaggtaccagtgctctttccttcgaggagagcgaaaagaacaagggccgtgaaggtgcaaacgcacgcatgcccctggaccgccgtggtgatctcaaggacttgacatttgaatatggcgccccgatcaaggtcaaatggactgccccactccaccacagcaagaaagattggattggtctctaccgggtcacagacaatacctcgcgagaggtcactcgtgtttcatcgcaaggccgctgggtcgcaaccaacgaaggcgcatacgacaactcgacctgcgagaagggtatcctcactagtgatgttgttacctcgtcgtctgagcgtcagggccaggacccctgcgagttcgcatctggtgagatcgttctttctggcaacaagctcttctggaccgagggtgtctttgaactccgctaccaccacaacggtatgcacaatgtcatggctatctcgaggccatttgagattcgtattcgccggtcggatgaggatgaaactatttccgacggttattcttttgtggaatcggctgttgaggatgccttgttgcccgttgttcgtaactgtttcgatcgtgatcctgaaattgccccagagactgttgatgagcagttcggtagccttgttgaacgggatggcaagtttgccaaacgtgttgtctttgctgttcatcagatgtaagttctctttctcaagatcatttcaatcgttgatcatattctgacccttcgtcatgcaggttcggtatcgagttggcagctgaggttgtcaaggccgacggcaacgtgcggaatctggcttggagaatctgcaacgccaagaaagttcttgtaagtatcaaattgcaggctgaaatctgcttgttggaccaaagctaactcgtcaacgatgcaggctccctacagcatgtcaagatccaatggaacgacgacaccagtcgaggagagcaaataatgatccatcgaggcagattcccgatacgtcaaacccagccatgcacttatgttggcagacgacgactcgtgttgaagacacgcctcaatctcaagtggatttggcattcgacagttgagtgctttacagcaaaaaacaaaatcaccaaatcacaaaaaaaagaaacatgtcataactaggagaaatcatgtgttgaagaaaagaggagttgtcctgttttgcttttcttgcctcgcatgtaaatgatgatgcgaggttcaagataatgattcccatgatggttttgtttagatttcaggggttgggtgggttgcagtggtgattttcatgtgtcttgccttttggggacgatttggctgtgggctgattactttttcttctctacttcgtacatagcttcaagagaaatctattgctttttttgtgatcattgacttagttctctaagactcttaggggaatgggagacataaaaccactcgcaataccaatatatcggggcttgtttgatagctctgaagagtatatgataacaagtaactacataagggcctccaacttcaaccatctgctcttagccttcggctatcagttctagtacgcatcggaaaatagacccggggagaaggcatagatgcagcccacaagtcgtgggataagcaatcaaactcatttactcgactacgaagatttcatgacgcagatgtttgctaatatgcatgtattgaactaaactatatattatggtatcgaattggagacctaggcaaagctttgaatgctgtcagcgaaagtccaaagacccgaaggagcgaaacaagcacgaatagcttcacaattgcaagcaaaagtagaagcatatatagtattcagtcaagccggttaactcatcccatcccctgttggcccctcgcaccgaactgtcacccaagacggataagcagcccagcattaggaaaccaacacaagccaagtatagcagtaccatgccgcggacaagacaacaatgcaaagaacgtaatcagacgacgacaagcccaaagcctccaggctccacaaccttcctccctttcacacccgaaggcacgacaggtccagtataagggagatggaaaacagtggatcgacgcctgtattcctcacaacgctgtacggcttgggtgcaacctgaggggcggtcctccaagaggtcgttgaatggatagactggttgtcatcataatagctgggggagatgtgcagttgaaaaagacaatgatgtaccttttggatatatgaggtagaggaccaaacaattgatggtttacagctagatctttttgagttgttagcactcttgtcactaacagggtggttgaaagacaatgataatgactcaagaaggatcaggagtttttggtaagtgttttgttatcttcaaaaattttgcagaagcagaactgaaaaggtttctcatcataatgagtgcaggtgggaaagtaaagaaaaaaaaagaatgttcttaccttattagttcatatttctcatgtaatccaaaacaaacaagagtgttttattcctgtcttaagcaattgttagtcgctgatgcgtagcagtagaatatttgaaaacaagagtaaaattgttgtcattatcagatggtgatgcatgtttgttcatggcccattttttgtcgccaaacaggagttggaactctctcgatcatgtagacagggttggagggtttgaagggtactcacttatagcatattagtgatggatgtagtaaaatataacaactatcatcaagattccactccctcagcattagaagaagtttcctcagtaaattcagagtgtgtgaagaagagaaaggaaacggaagagcaaaaaatcgaagaaaagtcgccaaaaaaccaaacggcgctaggcggtggggcctacaaacagtgcaaactcccaagatttccgtttctgggactttgaccaggatctctcgacagcttcagttttgcgccaaatcacctaaaatggctgatagaagacgtatcaatgggccacctggtggcacaagacctccagtctatgcatccctccaagaatcctcgacaggcgtcgcaaaccgcgcccagcgccagcgccaacccaccgagctacggaaaatctgtatgaattgccgacaagcttcttgttgatcgcagctaaccttcaatgctctagttctcaaaacaggactgattccaaccgcctcaggctcttcatatcttgaatttgaaccatccgcttcccttgccgctgcccgctccaaccccaaatctctgatcccgccctcctcagcactcaaactggcttgcactgtccacggaccaaagccgctcccccgctctgctgcattctcgccgaacctcgttctcaccactcatgtcaagtacgcgccattcgccgcccgcaagcggaaaggacatatccgtgatgccagcgagcgtgaccttggcgtacatctagagaccgccctccgcggcgcaattatcgccgagcgctggcccaagagtggtctggatatcactcttacaatcattgaagcagaggatgaccgctggtggggtgatgctcccgactcgcatgatgcgtcttggggaatgatgaacgttctcgccggttgtatcacagcggcttctgctgccattgcagatgcccacattgactgtcttgaccttgtatccggtggtgttgctgctcttgtctcggacgactcaaatcagtcggcatcatctgccccgcgactcatgcttgacattgatccagcggaacaccgatcgattttgtcggcttgtgtggtggcatacatgcctgcgcgcgatgagattactgagctctggcttaagggcgatagctcaagggtggaccttgaaaaagacgatggacgtacgggtcatgaagctttgatcgacggagctgttgatgcggctcgtggcgctaatactgtcttggccgaggctgtaagggaatctatcgctacgtcttttgctcgcgtctaaaatactcacaacacataacgaatgaatgaagtttattggctctatcattaatgtagcaataggctaatttttgtgttcctatttaccgatccatttgaagctgtgtcacaagactagaagatgccctagaacgcaagaatatagttatctagagtagtgggtttgtaaactgatagcctaagattttaacaagctactaggtgtttttactccgtacttgcttttataatcctacctttttgcatgtaattctccctcggtgttgttgtcgtccaaaataggtaggcttcattgatatacaacggagactacaacacatgatcgcagtaccatactccgtgggtcgcctttcaataatggtatgttgttagttagagtatggagtagttacaagacaataatttaattgactaacataaatattttcatgttctaaaaaaaactggtcaaagccaaaaagaaaggggtagatagagttggacgttagattctcccataaaacaaattatgccgatctacggagtaggcaaggcccatcggaatcgatcgatcgtgggacatcggatctaagtagttcgtggcatacaaccaatgggcacatacaatatgttgaacaaagtatgaagtactaccacaataggacttagaaggagtagataactcctgcagcgttttggcagggttcaacatgaaagatcgacctcaatttgcccctgagagtgaacatagtacggtatactagtcatgtactccgtaatacgtacaacataatatagcgaggaggacgctactgcggaaaggaatccgagacccgctccagagacctttttgctctttgtccctaaaaccaactccaaagctccatccgactttagcactattcaaatagccagagcccggccgtaaatggtacagcgtatgtacttggttcatgtgttcccgctaagcagacggctcacggtctggcgatcacctcatcacaccaatgaccggcttgcgcggaaattggaagctccatcgcatgccacaattcaagccccgaatccactatcgttctctcccgttcgccagaattagacattgaaacccctcgatgaaccgctgattggtgcacgatcgctggtggatgctgttggaactcactagagcagcttctcgcccatcgaccagcgatatggatcctgtcaaaaaacttcacgtgtggatcacagctttggatggggcagcctatgatccagtctgaacgttttcttccacgcgctgcgaaatcgactcattcagatctagttctgggtaaccttttttttctcgagattggctcgaaaagaaagggaaagactcgactcgagctgcaattgccgaatcatatttccaaacaaagaaataagggcatacggagtagatcctgagaaattcagatcttaggatcatggagaagaccgggtcgctcccccctgattcagacacaagaccggcgatagatctgcactctgctgtgacaagatacatagtccgtactggggccctgttctactttttgggacttcgcgacttgactaacttgactttcttcttctttttcctgccttctgatgatatgacacctgaactgtgtgacggtcttcaattcttccagtttagatgtcatgacatcaacttgttcaattctttatgaccgctggtcttgtcgctctcttaattattagcttgactttattgtatcttattttcctctcgtttacactaccgttgtccttcattttccaattgcgcgccggttttgcgcttgatatctacttcatttcttcaagatggtgccattaaagaaactattccacacggacaagtctctttctcgttcagtaaccacccctggacacgaggactgtggaatagacctacgctattttcaaacggcggttgactcgcctacacgaagtccatttgagggtggtttcccgtccagaaattcgcagtcactagatgtgggtcatcattttgatcagatcgaaaagcacttcgaagatctacatgatagactggaacggccgatatctcctcaaccccaattgcagcctctcagcactcatttcgcgctctctaaatctcaaaatggccgacatatcgacttgatggaagctctgttctccacggatccaacaactaccccggaaccactttctcctcctgctagtctatacaacgaagatgttgcggaacgaaacatgacccggtttatacggattcagtaccgcaatggacttgctagctctggtatactttcggccctataccaagaggatgtggccgacagaaatattgcaaaatatagcgcacctgctcgccctttgtctcacttaagttctcggtcatcgccagctgcgcctggtacggtacggattccagaaagccaacagcgcaaagacaggaagcgggaaccagggaagcctagctggacgtcggcagaaaatctacggacacagccctcgccagatgatggctcgggtacttcatctccacgatcacagtcgcagcttggcaatcgcctcagaccccagagatctgcgccgagcctctctgcggacgaaggcgttgtcccacaaggaaatgcacccccagctcctgtctcgcgtttgggcgttcctcctgcctataaacaaggcaaaaggtggagcaacactcctctgcctgatagtcctacaattcctatccctatgggtgaaagtgacggcaccgcggaggcgccacgaccacctgctacaatagaccgcaggacacaaggatcgcttcctccgccacagttatcagaattagcctccaaaaagaatgcacgaggactttcaatcaatacaaaattagctgccaaaggacgcccaaaaattgcgcatcgtgccatccagccaccaacaccctcaacttacgaattgacgcaggcacctagcatcgcagaggtcatgaacagtcctctgcctgttcccagcccaatcagtcccccaaaatcatctccacgcttcaaaccctcggacgtgatggaatttttcaccaaggcttataagtccgttcaaagcccccacacaacatacgagacactgcaggacgccatagtccgcgaggtcaattcccacgaggcattccgtcgagtccccgtgcccgccccggggcctccattcacgccctcagcagaccaagccgaattcagcaactgctccagaccagcaacgggactccaccgaagcgcttcagcgaagaaacggctcatgaacaggaattcatacaagcacaagagggcccccgaaacccgccgtagcatctcaacaagtgtcggctacgaccgcctcctacgaaaagtctccggctcccccgctcgccgtcgacacactgatgccccacccccaaccccaggcttcctggccgaattccagcctcgcacagagcccatcatcacccgccctggatccggagagccaatcacgtatctggatgtactgcacgcaagcagtgagcatcaacctctctcaaccggcggctgcgcaagcctctctgtacctcgcaaacaaggacgctcgaaatctatcggcgacctctgcttgggctctaatatgccttttgtccccgggacagtctactgtatgcaagctcactcggctccttcgagtgattcctcgcatgaagacagcgacgatgatatcattcagcttcctaacccgtgtcccccgccgcgtgtgcagattgaatgtgtcgacgagaataacgtccgctatgtcattgatactgcttcgccggatgaggcacacaaacttatgtactggcctcaccaggttcgccgcaatggtaccaccagtccttacgggaatagtctgtcaccgttgtctcgcgctcgcatgcagcttcgtggttcgcgctcggttgagacttactaggatggaatcaacgttctttttgcaacccaggcgggatgtttctattttgccgcatgataacgatgctcccacgactttctccctctctctcgccttcttgcttcctccaaaaaagccgttcaatccgttccaatcttggccatgtcgaattaaccttcgatatgccggccaatccttgtcataatcatacaccttgtacccatatatcctgtcatatattaaccctagtctatctctcatccttttttttttctcttgtcttataccggacctccaattatttccttatcttgtcttattgccgtgcttgcatgatttggccggagttgcttattattattacaggtgtatattaaagctccatagcgtttgccatatatatcaatatcctattgttcgccttgcaatatttttctctctcttcatagacgaaatgggtattgtttgccaatttctttgccccctgtgctatggtactttgatcaactcatactatcgtatcccactacattgttcttttccgtatcagcttctgtttctcgttcgatagaggctcggcttaggatttcggatccccagcgtgcatatcttgtgctatttgtgcgctatttattgatagcttgacactggtctacgggattgccgataaacgaaaggaaataaaatcacagaaaagcaataataatgacatgtctcattttcataatatcattgccactacctgccatttccccttaaaactccacattgacaaatcaacatattgaagggacgccttggaacccacagaagaaaatgccatattgtctgatacttcgacttgtttcactatgaaccggagagtgtcgcaaaatacaatcccctcggtactcgatggtggcggccactggtgctttggactgcatggtagttctggcggcagcagatgcaagtcctgatatggatgcaacgcaatagcttaatatgagcctatatcgagatagttagcgttttgttaagaatcattgaggggtaagaaactagggggtagaaacttacggccaaacatgcaccacttctcagcgaagcgctggcacttggggttgcagcagggagtaacaccctgctcaataccctcgggctgctcgaaaggaatgcacagagacttggcgcccatgctgggagccttagcatcctcagcctcgccggagtcttcctcggccttgcgggcactcatttccttgatctggtcctcgcactcctcggtcaagcaatggggaatgacgcagaggttcttgttgttcagagcgggaacaaagtcatcccacttggtgatctggatgcggtgagccttgaactgctcgtcggcgcggttgtacaggtcggtttggatggtctcaagaagcgcagacacgccagtagccagctcggggatcgggatactgcccttgccatccttgccggggatatcacggcgggcggtggtgacaaagtggccagcggactcgccagggccgaactcaatacgcagaggcacaccgcggagctcgtactggttgaacttccagccgggggagtagctgctcttgtcgctgtcagcacggatgccggcggcaacgaggacggcgacgagaccgtcgacctcgacattgagcttctcgcgctcctcttcagtggtcttggctgtaagaccgactggaacaatgataacctggacctcagccacacgaggaggcaggaccagacccttgttgtcactgtggatcatgaccatgacacccagtgagcgagtcgacagaccccaggagttctgccagacgtgcagagggggcttcttctcatcgaccgtggaggtgggatcctcgacggtgatgccgaacatcttactaaagttctggcctaatccgtgggatgtaccaccctgaataccacggccagtggcggggatgtagccctcgacagtggtggtgtagttaccgccggcgaacttctccttctcggtcttctggcccttaacgacaggcacagcaaggagctccttgtaaatcttggcatagtagtcaaggatgctcaggacttcctcgcgggcagcaccttcagtcaggtgagcagtgtgacctctgcacattgttagtatgtcattttcaactaagaagaatgtcaaaaacatactcttgccaaaggaattctcttgaacggaggagtggttgagggtgcttgaattcccatctcactgtggatattagtaacacttcgagggtatggagaaagaacggagaccgcaccgactgagttccactggttgagacgaagggggagatcacggtgactgcggatccacttggcgtagtaggggtacatgacagtctccgaggtcggacgaatggcaatcttcttctcgaggggggtcgagccactagaagtatgtcagtgtagtccaattgaattataaaggtattatagggaagggacggcatacgcgtgcgtgacccaggcgacttcagcggcaaagccttcgatgtggtccttctcccgctggaggacatcctcagacacgaatagagggaaagagcagttcttgacacccatgcccttgatggctttgttgaagtattcctgaatctcctcccagatgaagaacaaggcaggcttgagaatgaagcaaccggagacatcatagtagtccagcaaatcacccttggtgagaacctgctggtaccagccggagaagtcctcctccttcaagacatcaataccgatcaaagcggcaccatcaaccttcttcttagaagctttcttagcctcttgcttgccaatacccttctctcccttatttgaggccttcttgtcagccttatcggccttcagtttcgcgagcttcgcggcttttttagcggcgttctttgactcacccgccttgtcatcggcgggggtttcagtgcggtcaggcaaggtctggggcgcagcgccctcgggggtgcggtcttcgctggggttctggctagccatgttgaagaagcgagtgtctgactagacaatgaaggagagacccagtaggattgtaagcaagcgaaatcggggtatgactcccctccttgaagtgggatgcgatatcgaaaattaccagcacaccgcttcggcagaacttttagtgcccacagcacccccccagaagccagacagctctgccatcgcactcgaatagctcatatcacatcgtctgttttaaatatggcaggcatttttgaggcgccgcggaatgcggacacgctctgtgagttttcatctgaaccatcatcgttttcgttgcaataaactgaccattctcgcacagtcttgggtgggcagaaaatcaccggtgctgatgtccgtgagcagaatggtatgttgaattattgatggatttcccgttcttggggatggataactgattccttgcagttctggcaacacaagccatcgctaatgtcatcaaatcctccttcggtccgtccggtttggacaagatgatggtggatgacataggggtatggaaacgataaaccccgcagagcttggctgcaacttctaacatctgacaggatgtgactgtgacgaacgatggcgctactattctgtctcttcttgatattgagcaccctgcgggcaagatcctcgttgagctggcccaacaacaggacaaggaggtacgggcctctacaacacattttcaaacgcacacgctgataatgatttcaaattcaataggtcggagatggcaccacctcggttgttctgatcgccgctgagcttctccggagaggcaacgagttgatgaagaaccgtatacaccctactacgatcatcaacggataccgaattgccctgcgcgaggccgtcaagtatatgaatgaaaatattacgactaaggtggataatatcgggagggagagcttggtcaacattgcgaagacttccatgtccagcaagatcatcggttccgattccgatttctttgcgaacatgtgtgtggacgcaatgttgcaggtgaagtctttgaaccagagaggcgaagtcaaatacccagtcaaggccgtgaacctgcttaaggcccacggaaaaagtggcactgagtccgtactcgtggacggttacgcgttgaattgcactgttgcttcccaggccatgaccacacacgtggccgacgccaagatcgccattctcgatatgaatctgcaaaaggagcggatgaagcttggtgttcagattacagtggaagaccccgatcaactggagaagatccgtcagcgagagtccggcattgtgatggagcgtgttgatatgattctgaagtctggtgccaatgtcgtcctcacgaccaagggcatcgacgacatggttctcaagctcttcattgaaaggggggccatggcagtccgccgctgcaagaaggaagacctgcgccgcattgctagggccaccggtgctaccatgatcagcaccctctctgacctcaacggagatgagaagttcgacgcatcacaccttggacacgcagagtcagtttcgcaagaacgtatctcggacgacgagtgtatcctgatcaggggtaccaagatccacactgcggcttccattattctccgtggtgccaacgagtacagcttggacgagatggagcgctctgttcacgactctctgtgtgcgatcaagcgcactctggaaagcgggagcattgttcccggcggtggagccgtggaaaccgcacttcacatctaccttgaggaattcgcagtcacagtggtaagtaatactgttcgctattctttgctcccatatcggtttctaacattttcactaaagggctcccgtgagcaactggccattggcgagttcgcacaatctctccttgtcattcctcagactctggcagtcaacgcagcgaaggattcatctgagcttgttgcccagctccgtgtccgccacgccctgtcacagcgtgtgcaggatggcgatgctaacgaggaggagaaggccattgctaagaagaagacctaccgcaactacggtttggatctgacgaagggacgggttcacgacactttgaaggccggtgtgctggagcccagcatgagcaagatcaagcaactcaagagtgctgtggaggcttgcatatccatcatgcgtattgacacgatcatcaagctggaccccgagcagcagcaggatgacggccacggccactaagcctaagcttactttgactaccccaatccccaaaaaaatggcagtaatatgatgtgacatagatgatcagcagtagtaaattctcatttccgctgcactgcatatgaacgaatttctcttgaagtagatacatgaaactcgtagccctaaacaaccattctactagatctatatccctcactgccgcctggcagccatcaacttccggtattcctcaacgatattcctccgctcaccagccaattcctcacggcgtctcaaactcccaaccgcagcaggcacattggcaacatcaaccttagccccgccacgcactttgaagatctcccggggtttgaccaattgaggcggcgctttcgcaacctcaaatggattcctcttccgctcctcgtcgcgcttcttcagcttagcccaaggatcaggatcatcatccccactatcagcgtccccattagcattcgtccccttcttcttgcttttcttcgcagccttcttcttccccccagcagcctcaatctcccactctttccactgccgcaactcaacctccatctcttcctccctctcttccctctcctcctgctccttgtcgcgaatcttagcgtcctgctcacgccaccccttctgcaatcgcagcaggtgcttctcatgcttcgtccgcttgtgctgctccttgttcttggcatcacccgtcttgaccgacttggtcatctgcgacaatggcatttcgcggtcaacacgtgccacaaactcggccagccgctcgccaggcatgattttgggcgtttcggtcttctccttggcggcggttttgggtttttgtgtctccgctgccttcgcgggcttcttcgatgacgctgttgagtcttctgtagcattgcgcttgcgcttgttcgggcgctcgcccgtctctagtcccgatggcgctcgtcgacctgtctgctggtattgcattaggcggcggaatgctttcggggtgtcgtcttcggtgacagtcttgaggcggtgggtgggtgctttgttggcgctctggttctggtctttgccttggttcttgttgacgagttttttgccattcttgcctagcttaggcttgactagatcgcggactggaagggctttcgcgatctctgagggtgggagattgaagtggctgccgcgagtggaattgtcagttttgggctttggataaacttagtaattactagtgctcacgctatatcggcttcgccacgtctcttgtgtttgtgaggcattttgggtggttttgcaatggaagtttggaggattggagttgttggcggaactttttttcatcgaggttagccttatcttacttatcgctctatgggcggtccacggatctccccagcattcgccattccaaatatcagtctattggcatactcgagaaagcagtaattgaacttgatgaatgagggatatgtttgttcagataatgcaaataagtccgagataaagggtatgcttcgctaataatatgcccccaaacgccagtaaaatgcccacaggcaaaaaaaaaagaacacctaggaaaatgcaaaacaagaaaaatcacagaagaaaccggggaatcattcatcttcatcgtcaattgagtctttcatatcagcccagccacacatgtggcgtttaccctcagtttcaccaccgtttcgaagctcgcgagcctcaggtccctcacgccagcatcgagcatcgtagtcatcactcacggaaatgagttcgccagatggtgtccaggacaaaccagtgacctctttctgatgaccttcgatgaggggagtgcctgattggtaaattgggatggtatcttcgagacggccggacaagccgattccagagttggtgcgacgaagacctgagcgagtggtgaaaagggaagtcctgctaggcagagattcggctggtgttttcacggtagaattgagaaatcgttcatcggtagggaagaggatggggcagtggtcactgctcccagttgccaacatctccggatgatcgtagcttgctttgcgcacagccaacttcacatagaatgaggatatttggaggcgaggatggcggaaaccatagagaggcccaagaccgtccttgtcggagcctccagtccttcgtggacggttgttgttgagcgagagttcaggagcatgcccgagaattaagtgtgatgtcgaatatgtgtaaacagtattatcccggcaaagtgtgtataagcgtgagccatctcctccaaatgccatggaagttagaccaaagcgtcggtacttcacatggctttctggctcttgcgttgtagatagaggaatgacgggtcgaccacggcgattgttatgggctgttcgcaaatcccacagtctgacgcttgcgctagcctcggaagccgtaacaaaaagattttcgcgtccaggcgagagaaaagcgagggaagtaacggtgatgtcggttcggccaattggtggcgcatcatttttgtccgtggtcggtttatgagaggtcgtgtatgcatgagcaccttgaatggtattcagaacatgtgggtataacatctttggctgcgcagtggtcacgacattttcggtctcggatagggagcattggacttgcaatgcaggccgttcaaaccccttgcagcggagatcccagatattcacatttccatcccgactgcaagtagcaagaaccttattgttggatgctggttggaattggacacgcttaacggaggatgagtgattcgataagcagtggataggtcgttgtgttgtcatatcaataataagagatgtttggtctccagatgctgtagccagtagcatgtcgtccgatgagaactcgagatccataatcgaattcatgtgcggacggaacccaaggtatgcatcagcgaatccaggatcctcgtcaatcgatgaatccaagagccgaattccaccctcttcatcgcccactgcaacaagagaatttgcttcccatttgttagcatgtgtaggatcagtcaggtaaaatatgactcactgttgcatgaagcattacaaaatgggagggccactgaacgctccgatccatagctagaacacatgtgacggtcccgcggtttcgaatagaagttggaagttagatcttgccagcctagagaaaatattagaggtgtataagaaagccatggggtaaataccaaccagcgccagagttagatcgtagagttactttatttgctcgagcccccatcacatttcgcataaataaagcaccggatgattgcaatgcctgggagcggcgcacaggggccacggggggatttcgtttgggtggactcggcggtgctgatgcatcaaggcggatgttgatgtttgaaattttaatatcttgttccacatcctgcgtcggagaccggacacgaactctcttcagaggcgaggattgcggcgagacgactgaagagaatgagttctttcttttcctgcttggggtgcgaatgaagtcctccggtaagccatcgtgggggcttctggtgctgccagccttagaggttcttgaaaaggccggtcctagacgattcaccgcgggcgatgatagtgcccgtaatgcctggcggctagttgagggcgtgatagaagtatccccgactggtaataaagagcgcggggtaaagaatcgacggaatgaccggggcgttacagtcggtggctttctaggtctgcgagtatcggaagcaatagacggcggggatgagggtggctctggaggaaggacaggctctgaccggggtacttccgggagattgaaggtgtccattgtgtgttgaacaaaaagcaaagagaaaatcaaaggctatgcaagcattggtggtattggtggtggctggaaggctaaagagggtcagagattaatcggggaagttggatcttttcccgtgtcgcgacgtgacgcgatcgtgttaaggcatctaaggcatttcaaccccctccatccttaatgccgaactccttcactctcaattatttccccttgatgtttgaataaggcaagtcagtttgaattagttcctaggttaaagtattttcccagttttggtatcaaaacgcgtgaaatcacacgatattgatcaatttcccaatatcagactactataatgatggaacgttggaacatcaaataggtcccttgattaacttttaaagaatgctcaaacagagggagatgcaaacagagggagatggacctaactcaggttatgttgtatgctcgaagtataggtcctgtcacgtcatgtgacctacaaggctgtataaacatatattgtccaaacatagaaactaccctttcctcaacctttcccttgaaacctaagcaacatttgctccattctaacgacatatgcaccttgcctctcaatcatacttttcaatttccacaaaatgccaactacaacagctctttctccttttacgtccgacctagagttaaagtcgtactgtgaagaccaagacttcctatgcaacggagagcccgagcctaacagtcgctcgcagactttgatctatcattttgaaaacaaaaagtggtggatcaaagtaactttcaaaggcgcgatttcttctttcccccaaaacaaaacaaaacgcgaacgacgaaaggaataccaagactttgtcaaattgttcgactttgatcccttggcccttctggatgatactgtgtctgaggtaatattgagcgaagacccgggaacaattgattctatcaatctgcgtcacgacctagaagataccagcaatcgggttataaggcttgttggaaacctatgattctatatccgggaggacccattgagagtgacttatccactatgcctccgatttccctctttccgcgctatcaatatcgcagaattgatagaagaggatgaaatcaccgacggagtattccgcgttttacataggagcgatagaactcctcacatcctcaaagtagtcaatcgccctctttatcaaccacgcgactcggatgtcattacaaaaggaactagagaatcttgaacatttcaaaggcgtgatagggattgtgcagtcagctggtattgcggcgtttaacaacccgtatgcgacctcccaaaatgtcgaacaaatggttatcggtggtattctattagaatactatagtggcggttccttacaacgtgttttaagtgaacagcgtataaggaaatttggttgggagcgatgggctatctaaattgtaaatactttaagcattattcaccgtgcaaagcaaacgcacatggatctcaaaccttcaaatatcggtctcgacgacgatggtaatgcggttatcattgatattagcggtatcggtggaataacgtacaactgacttgccccagagatacgcggtgaactgacacgtcttctgttcgaaactcgtcgattgaatgatatttgagcctacaggaagattttgaccgaaattgcgttaaacgcagggaacagtccgtttgcaagaactctgaagtgggttgcggatcatttaaccaaagatgttgacgcccggtggactctgtctgatggattgtctcatttgaaaattgctcaatgtattgattagttgatggaagtgagctgaagcctcccctctttcggttgctctgtagtaatgactacataaattgtctctagatacggggtactctgtttaaggatgtgagctaacagaatgaccaataaagaagagggaccggagcacctctccctctttatgttggcagtcagtgaattgctggattaaggattcgggtggccaaggcaggggctgcgtgatatacgatgtaaacaagttgatattagtgcgaacacatgttcatgtactgcaggttgccttctaaagggcaaagtcgatgactgcatgtggtagtcagatatatacaatagacctattggttcgatgtctctatgtgagactactaggtatacgatcttcatccccttctcttactgttatagactgttcaaaggatgtaattgggaatactacctcgtggccagggtggcggacacaatatttctatgtataattatcactcacaaacacagaaacctaccataattttacactagtgccatatggtaagccacattgtacataaaaaaggcaatcaatatacacggtctttcagctcttcagttcctcagctcactcttttgagaattgtaacatccaaggtctgatttcgcacatcaaagcaaatactgacttatgaaaagggaccgatatatcccaagtcatcttagtctgactaatgtcctgtagatactttccattatgacgagacagagaaatgctttccgatggatagttagcatcacttgtgaggatgcacttactccccactccatagttactcctgaggagcacagaggccctggatgtatatttaaatatgattccatgatatcgtaggccaatttcaaacatagctaggtagcttcaagatagtttggttcagtccatacagatctcggcgggattcaaggttgtttgtccttggaattcaggcacattgatttgctgactcatgaccccaggtcctgacaccgccctgaaggttctgccgcatccgcggaatttttttaatcttttttttcgaggaattagaccgcaatctgcaactgcacgattcggttttgccagtttaagaatggcaccaatcaagcgcaaggggaatgcccccgaagaaaatactgcccgccagccccaaaaacgtgctaaagttggagcggaggaggtcaacagagaccataagaagtcaaacgatgctaccacatccaccgctgggaaagcttcagaactttctgtgctgcgcgatgacgagccctcattccctcgtggtggcgcaagtgttctgacaccattggaacgcaagcaaattcagattcaggccaacagagatgtcttgttcgagcagaaagaatctggaaacaagaaaactgcccagaagacaccttccaacgaattcgccgaagaaagcgacaacgatgttgaaatggaggacgaagaaacaactgcgactacgaagaagtcgcgaaagaagaagtcaaaaagcaagaagtccgcagacaaggaagctgatgacaagcaaaatgttcgcatcgagggtcttagcttcaaggtacgtgctagaaaactctttcatgtcgcatcactctaacaattatagcgcattgtacccggagccatgatcctgggccaggtctcgagtatcaacgcacacgacatcggtctttcgctccccaacaaccttaccggttacgtccctctcacatccgtttcgaagggcctcgaagacagacttgagaagatgttgaacgatgaagctgggaatgacgatgccgaggacagctccgacgaggagtcctttgacttgaaggatcatttctatttgggtcaatacctgcgagcattcgttgtgtctactggcagcaacccggatgatccaaaggcaaagggcaaaaggcgaatcgagctttcagttgaccctagacaaacaaacaacggcttctcaaagtctgatcttgttgtgaactcagctgtccaagcgtccgttgtcagtgtggaagatcacggtgtggtcatggatctgggcatcgaaggctcagaactgaagggctttatgtcctccaaggagaccgatcccagtgtggattattctagcatcaaggaaggctctgttttcctttgcatggtcactggtcagaatcccagtggcaatgtcatcaagctgtcctccaacttccaaacgtctgcctcgatcaagaagtccaactacctcaattcggcacctacaatcaacactttcctccccggtaccgctgcggaaattcttcttacggaagtcacatcgaacggaatgattggaaagattatgggaatgctcgacgcaaccgttgatttggtccagtctagcatcaacggcaagattgatctggagaagaaattcaagattggtgcaaagatcaagggccgtattattgcgactttcccggctgccgagccgctcaaagtcagcttttctatgctcgaccacgtcctcaagctctcttccgatgctcgcggtcccggttcttctgatgatgcgcctgctatttccgcaatcattcctgaggtcaagatcgtaaaggttgatcaaggtctgggtgtgtatgctcggattggagaaacaaaacatatgggcttcgttcacatgtcgagactctctgatggcaaggttgaaacagtcgacgaaagttctggacctttccagctagacgctgttcacgaggcaagagtcattgggtacaactctattgataacctctacattctctcatttgagaagagcgttatcgaacagcccttccttcgcgtcgaagatgtgaacgtgggtgctattgttaaaggaaaggtcgagaagcttctgatcggtgccgatggtatgactggattgattgttaacctggctgacggaatcaccggtcttgttccttccatgcactttgcggataccatgcttcagttcccagagaagaagttccgcgaggggcagaagctttccctgaggatcctctctgtgaacctcgaaaaacgtcaaattcggttgaccctaaagaagagcttgctcaacagcgagtctgctatctggaaagactacaaagatatcactccttcggctcagtcccctggtaccattgtcaatcttcagagtcatggtgctgttgtgcagttctacggcgaggtccgtggtttccttcccgtatctgagatgagtgaagcatacatccaggatccggcccagcatttcaaactcggccaggttgtcaatgttcatgctttgagcgtggatgcagcccttggaagacttgctgtctcgtgcaaggatccctcgacattcaccgaaaagtatcgtgaggcctttgagaaccttcatcccggccatcttgttactggaatcgtctttgagaagtccaatgatgatgtgcttctcaagcttgacgagtccggcctcgttgctcgtctcgacgcttcacaactcatcgacggtcccccatcgaagcaaagctcgatgttatccaagctccgcgtcggacagaagctgaatgatcttttggtcctcagcatccagcgcgctcaccgtcttatcaaggtttctagcagggccagcttgaaaaaagctgccaagcagaagaacatcccgggccatttcgaggaagtccaagagggctcccttgtcacaggattcgtccgcaacatcacacccgacggtgtcttcgttgaattcctcggcggtctcactggcttgctccccaagcgtcttatcgaagactccaacctcgaacaacctcactacgggttggcaaaggcgcaaacgattgttgtcaatgtgcagtctgtggaccaggaattcaagcgctttatcctgagtatgaagcccgttgaggctacccaggccgctcccaagaaagcggccaagcagactgacgagagcgttgccaaccccgtcgatgctaacatcaagagcatgtctgatttcacatttggcagaatcgttgagtgcaaggtcgtctctatcaaggcaacccaagtcaatgttcagcttgcggataacattcacggccgcattgatgtgtccgagatattcgacgactggaaagacatcaaggatcgcaaacagcccttgcgattctttaaggccaagcagactctctctgccagaatccttggtgttcacgatgctcgtaatcataaattcctccccattagccaccgcactggaaagtaccctgtgttcgagctctctctcaagccaagctacatcaaggccgccaaccctgcccctcttaacatggagcaggttcaagtcggctcctcttggataggcttcgtcaacaatgtcgctgatgattgcctctggattaacctgtcccccaatgtccgcggcagactgcgcttcatggatgcatcagacgacctctccttgttgactgatatggagaaaaacttccccatcggctctgctttgaaggtccaggttaccgctgttgacgctgagaagggccaccttagtctatctgccaagcaaggatacgacaagctcacatttggagatatctccgttggcatgatcttgcccggtcgcgttaccaaggtcactgagcgccaactcattatgcagcttggcgagtcacttgtcggtgcggtcaatctgattgacctcgcagatgactactccaaggccaaccctaccgtgcacaacaagaacgaggttctccgagcatgcgttatcgccgttgacaagtctaacaagaaaattaccttgtcgctgcgcccctccaaggtcatgagctcctctctgcccgtgcaagaccgtgagatctcttcgctcaaggatgttaagcctaacgatgtcattcgcggcttcgtccgacgagtcaccgattctggtctcttcgtggcagtcagtcacgatatcactgctttcgtccgtgtctctgatctttccgattcgtatctcaaggaatggaaggactccttccagccagatcaactcgtcaagggtaaggtcacgtttgttgacgccgagcaaggcaagctgcagttgagcttgaaggagtctgttctggaccccaactttaaggctcttatcacccttaaggatcttaaagttggtcagattgtcacgggcaaggtccgcaaggtggaggagttcggtgctttcattgtcgttgacgggtcttcaaacatcagcggtctttgtcaccgtagtgagatggccgagaagcgcgttgaagatgctcgcaaattgtacgacgaaggcgatgctgttaaggcgaagatcattaatatcgaccttgagtcgaagaagatctctttctcactgaaggcttcccacttccaagatgaagaggaagatgacagcgaggatgaggacagtatgagcattgacggtcttggcggtgtcgaacttacgaaggacgacagcgaagatgaggatgatgatgagtccatgggaggtgttgatgtagaggatgacagcgaggaggaggaatcagaggaggaggatggagatgtcccgatacagaagcctagcaaggccggaggtctcggtgcgagcggcttcgactggagcggcaccgccaagtccgatgctgccgcgcgctccgacagcgaagacgagggttccaaaaagaagaagaagaagaaccgcaaggccgagatccaggtggaccgcaccggcgatttggacgccaatggccctcagtctgttgccgacttcgagcgactcctcctgggtgagcccgactcctcgcttctgtggctgcagtacatggccttccagctggagctgggtgagatcgagaaggcacgcgccattgctgagcgtgctttgcgcactatcaccatgggccaggatgctgagaagctgaacatctgggttgcgctgctgaacatggagaacacatacggtgatgatgacagtctcgaggaggtcttcaagcgtgcctgccagtacaacgagccccaagagatctacgagcggatgatcagtatttacatccaatccggcaagaaccaggtatgtatccattttgaatcttacttcctacggatgttaacaattttacagaaagcaagtgatctcttctacgcggctctcaagaagaagatttcctcccagtcccccaagttcttctacaactacgccagcttcctcttcgacaccatggcctcccccgaccgtgctcgggctttgctcccacgcgcccttcagtccctccctgcccacacccacgttgagacgacctccaagttcgcccagctcgagttccgctcccccaatggagacattgagcgcggtcgtaccgtcttcgagggtctcctttcctcattccccaagcgtattgatttgtggaacgtcctcctggacctggagatcaaggtcggcgatgcggagcaagtgcgccgtctcttcgagcgcgtccttggcctacagagtggcaagaagggccctgtcagtgtggacgctagcaagaagctcaagcctaagcaggcccgattcctgttcaagaaatggctttccttcgaggagggtctggcagctgccaatggagatgagaagatggttgaagaggttaaggcacgggctgttacctatgtcaagtctcttcaggagtaactctataaaaaagtgtgttcatctgaacctgccggtgtttggggcctgtgaatttcaatcttcaatgtttttacctgtatatagatagcgatggaaatattcaatcaatcgtcaacaatccagcacgtgtatacctcaggacatggtcgtagctttgaaagtaccacggatccaatcaccgccctcaatatcatggctgcctccagttttaagggtcggggaatctatttttgtgttttcccttctgtcttctctttacttcctcacccatgatgagccctttccgccctccccagaccaattcggtatccagtcttcatttcgatccatacagagactcactagatacggaatacccgaaggtcaatgtacatgttgactctgttgactctgagcgagtggggtatccggcccgctcatggcggcaagtctggacagccttggcttggccttcaacgtcttccatgctgtcggaaaacccagctaagcgcaagcgatcttgtcgatcgcgatacttacatggtctccggcgtgcgattatcggaatattcattatgctgtgagtttcacgaactgtgcaggccgtgtctatgcggaagaccccgctgacctatcgccgataacagaggcatcatccaatttatctccatcgcttgtggtatcgccctctcattcttcccagatgagtacgaccgtgcagttcataattggctacccagtaccgacggtacgaacacaatagacagcacgcgctggcccaccgatatttcgcgcgatatcgtccctgttggctgtcactcccacaacgattactggcgccgggtgccactgtactccgcactgcaggcgggatgcataggcgtcgaagccgatgtctggctcttcgacgatgagctctacgtcggccacaccacatcgtccctgacagagcgcctaaccctacaatctatgtacattgacccgctagtatctatcctcgagcgccagaacccaaccactagatttcaccggggaggccacagccatacacatggtgtcttcggtacagaccctgcccaatcgctcattcttctaatcgacttcaaaaccgcaggcgcggcaacctggcacgctgtcatgaagcagctcgctccgctccgtgaccgcggctacctaacccacttcaacggcgacgagctcatccaaggccccatcaccgtcgtcggaacggggaatacacccttcaacctcgtcaccgaaaacaccacctatcgcgatatcttcttcgacgccccgctcgataaactcgtcggcacggaccagccagacagcagcatcccagacgcagccctcttcccgcgcacagatcttggcacagatcttggccaaggccaatctggtatgccggctgtaatcaccgcgtccaccttcaacacttcgaacagcttctatgcctctgtgtctttcaaaaaggcaatcggctacccatggcccttccacttcacgcagcgccagatggacctcatccgcagccaagtgcgcattgcacaccaacatggcctgaaagtgcgctactgggcgttgccgagctggcctcgcagtctgcggaatcatatctggcgcgtgcttgcgcaggagggtgtagatattctgaatgttgatgatttggttgatgccacgaagggggtttggaatacgagggtcttcgactggtggccgtgatggctatgcattgctatatattgggtatctttcttcttgttttcttttcgcttttacttatgatgaaatatgggatttgatgaaatatgggatcatgggctggattgcctggcgttaagggtttcttatctgatttacgataccttaccttttctttggctgtgttgctttattttgtttgatagaccacttgcttcatatctatacatccaatatcgaaatgtatacgcagctttcgggatactgtactgatactgatgctgtaactaatctggcaagagacggaaaagacaacagtgccctggtgaaaacaacgcttcggttcaaattcgtcacaatcataatttcggtctctgttgcacccagtgcaggagcagtaatgctatactccgatctggaatgtgttccccaatgcccttgattgtcgatctccacttgacgccataatttatgcagtaaaatcaggtgaaaatggcatacattcaccaaagaccatgtagtggctctcgaccagcgacagcccccctaacaccgataaaccacaccaaacgtagctatccgcgggatgtcatatctcataaacagcagagcgcctcttcaccgaactcgcggataacactaccctcttcccgaatcaggccaccaagccagtgcttcgcagtctcaaaatccttggcaccgaacttgacaagcacaaagccagcgcgcacccgcgccgccgtccatgtgacattgcccttaaagctcagcgaaggctcaggcaccgacgacggtgcatggtccgaccaattgcgactaccaatgcgcggctgcgactggaattgtttcaacatgaacgaaccgagcgcttcgaatacaggaccggagagtataagcgtgccgacgacgccgtgtgggcgcgtgcgctccgcgatgatattcagcggggttaagccgactggcgcctgcggtggcagatcgacggggttttctagaccggcatgggtggtggtgctgtaggttttatctttcttttcgacttcgagtccgtcgggtatggatgtgtcttgtaggtcctcggattcatcgtcgagaattaccgagtcgcggaggagtagtcggcgtttgcccttgtcgtcttcggcccagacttcgttgcgtccgcgccagaagtggaagtcccagtcctcgccgcgcgaggtccggccttgcgttacccaatctaggacgcagaggctgctacgctcggcgccttttgcggtggcgtctacggtgaaggtttgaacttgagcgtagcggctgtgtttgaaggggacggaagggtctgggaggtagcagagggctgcttggcggccaatgttgacgtcgagtgtttgctggctcatgtcggagagagatttgtttgcgggcatttgatcgcggtggcctttgattacatttggggatgtgccgttgttatttggggttgttttgaagatcttggtgctgccttgtggcgttgttaccaccattcgtgtcctgggttcgagcgtaatggacacttcgatgtggtcacctggcaggagcccgccgccataggtgaggaggtataggtggacggggttggagggacatgtgtctgagagggcagaagaatctggggatgggacgaagccgccggtgcgcgggactagcttcaatggatatttgtaggtgagggttgtgagggtgggattgttcggtgggaggagggagaggacgaccttgccctgccctggcttcgcaatggaagactgaaagggcgagggaatgggcattgctggttttcgcatggtgatggatgtgataggttgagaaggcggagagacaagaagtgtagctagtaggtttataggcagaaatagaaaaagctatattgagcaatgaagccaggccatgctatcacagatcagaggggacgagttggtataaaaacaaaaccctggggaaatgacgattccttagtcataggcatccacttgtcaagcgggggatattcccaaatgacctctccttggctccctgatgaggatgccggagcaaaactaggacataaaataactggcagagaatgaatggttgaggtttctatgacaaagagtatctccctagacctggagggttacctcttggcaatgtacttttatgtcaattgcccaggtgatctgcacgacttgtttaactattatagcctggcagtctgggcattgaaaagaggtcatgagatacagtgtagctatggtaaatcagccatatgctttctattatattagggggtcaattttgtgatgcaattgtcgatgagaattgctatacacacacccctaaaactagctacacactcacttaaactacttcggctagggcctatcccagggagggctcatggctattctcatttctggacggaaccgaatgttcctggctagagactaagatcgagtttgaacaaggcgttgacagcgctaaaccccgcagctagggagaagaacgtttagttgactagtgaactatacagaatagacacctgatatacaagacatcaaacccctacgtagttacgtaatctaggcaccctcaggccccaaggcacgatgtcgcgtctccccccacgctgagatccggaccgttttctgcccaagtacttccgtttgattgaccttgtctcaacacggtcagagcgcgtgtcgcaaatacttgacgtctcgaattgcagacttctttcatatcttgcgccaacttctgtttgctgtaccagacctgcgcgttgcacgagcgcgcgtcccgacctgatctgtagcgacatctgccaactctgttcaaagccattgatctgctcagcagacccatctatccgatcgcatacccgtataatacactcatccgatatcatggatatcgataacccacctctatcaagccccggtggcccgtcatcgacccccgccgaagaccgacgcaaatccggtcggcagacgcgacggcccgaagtattttcgcagactacacactctgccgacgaacaagctgccggtgggaagcgcaaacggggcgaggcgcgcgaggacggcgatgaggacgcgtccgagtccgacagtgatgatattgacgacgagaccgatgaggaagaactgaaagagaagcgacgcgctgcacgccgagctagcgcgaagaaatccaaatccaaacccaagaccaagggatcgcacgcttcaaagaaacccaaggttgcaagtaacgggttagggagacagctcgccttccgaccagccaccaatggccgactgcctgctgctcgttctcggaaaccgaaagtacgaccgagtctcgcggcgggtgaacgcggattgttcggtgagtcataattatttgtgtatgcaatatcaatggctaataccagagttagccgaggtatttgggaaaggtagcaatgccgatacagtggccgctcagtggttatctcaataccagcgcgacaatgggcaggccatgcgggacctcgtcaacttcatcctacgatgcacgggtaccgatcttgagatcgacaataatgaggtggaagacattgataatgccccgggccgaatcgaagacttgcagaacctttaccaagcagaaggcatcaccgaataccctatcatctccaaagcgaagaagttcagagcgttctcggttctcctcgaggaattcactatggcactgatccaaaccttccatgcctcttccatcttgtacaccgatgacaccctgctcgagaatattcagatctggatctcttccatgtcaacatcaaaatgccgaccattccggcatacggcgacattaatctccctttcaatcatgaacgcattatgtgatattgcgcgagaggtgacgacaaccgtatctacatccaggaaacaacttgaaagtgagaagaaaaagaagacggtaaacaagggtcgcgtggaagcaattcaaagggctgtttcagagggcgaacagaaggtggagcgcttagacgagttcctacaggatgggttcgatactgtatttgtccatcgctaccgggatattgacggtcagatccgtgccgagtgtctgacagctctaggcggatggattcgcacataccgagaaatcttctttgagggccagtatttacgatacctagggtggaccctcgccgatgtcattgcgcagaccagactcgttgccttaaccgagcttttaagcctttatgagaaccgtgacaaccttgctggtttgcactcattcactgagcggtttcggcaacggattgtggagatggctattcaagatgctgatgtttcggtgcgtgtggctgcgattgagttacttaaccaccttcgcgaagccggcttactcgagccaaatgatattgatgctgtcggtcgactggtgtttgatttggacacccgaattcggaaaacagctggacgcttttttgttgccaacgttcaagatgcatacgagtcaatcaccgatgaagtgggagaggagatcgccgaattgctggctgacgacgacgaagacgactatgagtcgcctaagcactcctggatcaagtttaaatgcctcgccgagctgtttcaggcctacgacgaccaacaagccgaacagcaaccagagccattgtctcgcgacacactgctaggtgcggccgtagagtcgcgctttgctctcgcgactgaggctgtctatccctacctggaagaactgtctcagtggccatcgctggctggttatctgctttatgaccactctcaaatcaccgatgcgccatctgaagatgataccgcaggagccgtaaagaaaatgtacagaatggaagagggacaagaatctattcttctggaagtactctgtgccgcagtcaaactccgtgttctcgacatcgccaagtctgataccgacaagcgtgggcgcaagacgaaggctctagaggccaagatttccgagctccaggaggaactttctcacaaccttgcgcagatcatccctgggcttctcaataagtttggatccacaccggaagctgcttctgtcgttctgcgactagaacaccttgtggacctgaacacaatccaggatctccaaaaagacgctacggcttatacctcgctgctcagcgatatcaacaagcagtttttgactcattcggatcaagatgttctggccgaagctagtgtggctttcttgcatgccaagagctccgaggagatgcgagaggcgctagagagcaaggttcaagagctgtgggatgatatggtagaggcactggctgccttgtctcggaagaaggaggtccaggaaggtggctcaatatctgatcccactctcaccaacctgaccaacactgtctctcgaatttcgaacctcgccggtatcaccgattgtgcctccattctcgaaactgtccctaattcaagatcgcaatccaagaaagaccacaatgaagccccattcaacaccctcattcatcttgccgaacgtggtctgcgcatcgaagatgacgatgaggataccgctaaggcagagaacgaactggtctcaagcagtatccggtcgttgcttttctatttcatgtggaaggtgcaggcactgtccacagccttgaacgatggaaaggcctccttcagcacatcctacttcgaagcactgacaaagagccgcgaaacgttcgctatattgctcgtcaacatcatggaaacgcgccctgggctggatgaccttcgcttcacagcaactacaacatacctagacctacagacgctcttcagcactctcaggaacatcggccaagccaacggcaatgacgaagacgtcctgtttcaaacacaaggcctagtccatgaaatcgaacccgacacccaagccctcatcaccaagatccacggaatagctgagcgcacatccgccaagaaatcaaggctcaatatcgagcccgcagacgacgacgccccagcctcggaagacgagctcgactccgaagatgaagccagcgactccgaagacgaagtagtcatcaacgaccgcctccgcagtagcattgtagccgaacagcgcctctgcgagctaacaggcaagctcgtcctcgccatcatcgcccgcatcatcgacgcctccggctctaagcgcggcgccctgaagaagcgtctccttcgtcataagaccgccctcggccacaattaccgagaggtcctatcttatttggaagagcgtaagccccgcagtacgccccgcgccaaggggaaaaagcctgccaagtctgctgcttctcctgccaagggcttcaagtctgctgagcatattgatgatgacgatgagcacgaccatcctgagcctgttgaggaagatgaagatgaggacctgcgtgcgcgcggacttgtcgaggatgatgttgaacatgagaatgggcacgaggacgaggaacttggtcccacgcctgaggccgatgaggatgaggtgatgggtgactgatctggtctgtcttatttgacgttaatgtgtgcctgaacaaaatgatatttcttcgctgtcgttcattgcttgttacttttttttcttgttacttttttttcgctctctctactttcttctctctctcttttatggattatggctgaattgactgtacctctcttctttgctctcgtttgcgtggatatggagttattttcaacctgtatcttatacacttcccctgatctttactttgctgctactttgctgacttgatctcaatctattcccctctggtctctgctattttttgaaatcttgatatggaattgtggtatagtaaaatggatgtaactaagtctgttgctatcattggtacatttagactctgattgtacattattttcactgcctgagggcttcgtattctaacattgaaggcttgcaagtctagcatcagttcgtctcctcccgagaacataaaatacgaagataagttgtctggggaagataggaatatcctgggatacaattacgactacaggaagaaaaggtaggtcaagtgaaatctggcattttttcctggcgaattgcaaagcgtaccacgagaatagtgcaataacattttcagaggcatgattcgagcagattatgagcgtggtacgagcaagatgtgctgccacagccctgttgtcagcaagcgaggacgtgcccgcgcaggagaccaatgccccgtcaaggaacaccatagtcagaggacattaacgtaactggagagagaaaaccgatcctgcaaacaaatgcgcctgtgtatgaggatgctaaaggggtgggggaggggatacatgatggtgaatcttgtttatcgtgaaatcaaaaaaaaaaaaaaaaagaggggggnnnnnnnnnnnnnnnnnnnnnnnnnnnnnnnnnnnnnnnnnnnnnnnnnnnnnnnnnnnnnnnnnnnnnnnnnnnnnnnnnnnnnnnnnnnnnnnnnnnnnnnnnnnnnnnnnnnnnnnnnnnnnnnnnnnnnnnnnnnnnnnnnnnnnnnnnnnnnnnnnnnnnnnnnnnnnnnnnnnnnnnnnnnnnnnnnnnnnnnnnnnnnnnnnnnnnnnnnnnnnnnnnnnnnnnnnnnnnnnnnnnnnnnnnntgaaatgcgtgacaagagaagatgagggaatcaaatgagcaccataaactgtttagacgcaacgccagaccgagaagtagcttggtcgaagcgcacgagaggcgtcgaggctgtatgcgagcaacctggcctctcggtagccagtggtgcccgacccatgcgaggatacgctggacgcagcttcgacgtttgggtttgaaagaagatgaagatacaaggattggcatagtgcacgaggaaaagacaagtctttacatatccatggtatcaccgccgttgccgaagttgaagccaccaggttgctgctggccagtgccgagagcaaatccagtctgggtctgttggggagcaagttcctcgatatcgccaccggcctcatcctcgtcagagaagtacttctcgataatgttgtaggccttcatgtagatctcctcgttggcgttgttctggcaatcgtgaatcttctccatgccaccggcctcttcgatgaagagagcgtagcggttgacacgagcctcaccgggctggccagcctccttgtccatatctccgaccttgaggatgttctcgagaccgtcgagagcgacctggatgatcttattgtcagggcaggccaggagatcgcacaggggtttgatgcagccttgagaaacaaggtagcggatctgatcgggcttctggagaccaccggaagtagcgttagagatagcccagcaagcctccttgcgggtcttgaagtcaccattggcaagaaggttgataaggggagcaatgatgccagcgtcgatgaccgcctgaatctggctggagttaccggcagtgacgttggagatggtccagcaagcttccttgcggataccatccttggtggagctcaggagggagagcagagcaggaagagagccacagttaatgatcacctgggtctggacgtcatcaccagtgacaatgttacccacggaacggagagcgggagtctggacagaggtagaggcgtgcataaggagctccaccaggcgacgggggataccggcctcgataacggcctgaatcttgtcgttggcaccatcggacaagtaagagatagcccagcaagcgtcaatcaggacctcgtcatccagcatgtagatgagcttggcaaggactggaagggcgggggcaatagtgttccagtcaggctggggagtcttgccacggcagaagttgctaagagtccaagtagcgttgcggagcatgctcagcttgcggccatcgttgatgaggttaagaagcgggcgcagggcaccggcaccgaggacaaagtcacggcagtgagggctgtcaccagcaatgtttccgagggcccaaacggcctgttcacgaacatcgggctcagggctgctaagcaactcgacgaagatggggacggcaccagcttcaatgacgacctgggtctgctgggcggaaccggaagcaatgttggtcaaagcccaggcagactcaaactgaaccagggtgtggggtgagcgaaggaactcgacgaaacgggctacgacaccggtctcaataacacgctcgataggggggttgcgctccttggaaagcaatttgcggaacttggtggtggcctggatctgttcctcaacctgatctgagaaaactcccttcaccatctggggaagctcgacgttgagctgaataaatcattatgttagcttggtaattttcacgatgttttttttttattgcagtggggtcaagtcagaggggtcttcgtgggccatggcaacagggcggtgaaaaaaaatccttgttgatgatcgcatcatgaaaacaaagaattcactcagggcccataaaggtggtgaccacaccatgagcccgtagaaatccaaaggaggatatagaatagaacagatttcaaaggatcaaagaaaaattgaaagacctacctcactctcaatagcactggcctcatcatcactctcagtggcggcagccatgccaccaacaccgattctaccgtcctgagtttggataccacgtctcttggctaagttctcatcacgcttagccttgcgaatctcgacctgctgttcttcacggcggcggcggagctcatcgggcttgaactggttcttggccttgaactgtgtgcggcgatgctcgggaatatagcgttccgccatgatgaaaatggaaacaggaaaaactaagcgcgccgcggtgatcgattatgtagtatgtgaggttgagtgggcgcgcggggagatggacggagagtaggaagaaggaagagggatctgatgtgggggaagaagacttctgtgggaggggaaacgatgctatcacgtgattactcattcgacgtactcccacgacaataagctcgtcctccctgagctcttagaattccacttattttggtgcttatttatgacaattgctctagttatgacggatgtgcattgacagaaacgtgcatttttttctgagctagtttgtgatatctcaccgggagcttgcaggacatcccatcgacaaaagatatggcttcaggtgatctagtggacattaccactgcttgctcttcacaagggactttcaatgtcataggtgtggtaattgacaagctaccactctttcggaccagaggctcgtcggcatgcatcaccttcacgataaaagactccaattttgatgcaccaggctggcaaggtggtcttaaagtcagatatttcaatgatgatgagagttatcttcctaatgtcgagctcaaagatgtaatcctattacgaaacctcctggtgagtttatttacatgagtgcagcagcatggtaagctgacaggattcaggtgcaaatttaccagaacaaaccaacagggtttgtttctcagagatcccatgtgtcatgggctattttccgaccagagccaagctcgagttccagtccgttcattaccagcggtcccattcctttcgagccgagtctgaaggaaaaggatcaggcacactcgctcctggatagtgtatttgccgaagcaatccctgtgcaacaacccaccccgcacagtatacccgcctttcagcagtcttctcatgttcaggcttccgttccagccgcaaaatctggaggcctaccgtatatccctattcagtttgcgacggttcgccaactttgccagttacttggccaagttgtgaacctcaagacttatgacagtgaaaaatgtatgctggacttgactgatttcactgagaatgaggggcttgccaactacaaaaaacccggagaaggtgacgatgaatcaggtcctgagggcgaccgatttaattacatacagaagacaaagaactggtcaggcccatggggtaaatttaccatccgagtgactttatgggagccgcatgccagctatgctcgagaacacctcaagccaggtgacatcgttctattaacctatgtccatatcaaggaacgccgtggtggattggaagctgtcgttcatgaagacaaactattcccggagaagattcatgtcaggaagatgaatggtagcaatgatgagcgtgtacgagaattgatgaaccgccggacagaatactggaagatccacggtgaacccaaggcagataccaaaaaggccaagaaaaagaacaagagagtcgagcagaaaagggaggcccggaaagaagaaggccaactgaccatgccagcagcatcacgaatcaagttgaatcaacatggtgagttgattgtgttcctaagagaagcatattggctgataaatgtttagtcaaaacaaaaaattacacagtgcctactttccctctggagaagatcttattggcggagactcatacaaacaatgctccggggggcattgtctataagcttcccttccaaaacgtcaattatcactctcaggtccgggtagttgactttttccccccaaagatagaagactttacggttcaaacgaccaacgctcccttgttcggcaatcaggaaagtgccacggagtctcaacttggctgggaatggcggttttgccttcttgtggagggggttgagcccaaacctcccaaacaacagccccgaggaatgatgaagctctatgtgtgcgggcaagatggtgattttcttcttgacgattatgcattcaacctccgcgacaatccacggagactggaagcgataaaagagaagcttttcctcttatggggcaatctcgaggaggagaagtcgaaagccatagcttctggtcaacagagttgggggccagtgaagtcgtgcccattcgagtgctgcatcaaggaatatggtgttcactgcacccatgccaaagaccccaatgtgatggatgtcgacggcgaggtgtgcacctatcctgattgttttggatgggagagacgatttgccatgttcggcacgactatccacacatgaattctacaatccccaggtcttgtggaaaaaaaatgtatccctaaataaagcttgtatggattgatcctttgtactaatacaatttaacatttttaatcaatagatggttgcgcctggaacctttttttttcacccgcatagaaaggaagaaaaaaacaacgttgaattctcaatgcctgtatagcaagcctgctcccatgcaccgtccataactcccgaatgatcgaaattctgataatgtcatggatgcttcttttgaaccttttccccgtgaaactcacactgaactcaatagacaatattttaggaccttgtttcaagaaaggttcagatcggctgagatgagcataagattgcgagatggccgctcaaattttcgtaactttgacgatgttcgtgtcgatgccatgcgccacgggctcaaagcggcagctgtcgcctcggaagcaagtctttttaccaggttcgctctgaggacaacgatgaccatagatacactcgacgtcatcacattctagaccaaagcgacaaggtgtcatgcgggcaatggctgacaagatgtgcagatcttggcgtgacaatttgcgatcatggtcatgatagcaattctcttcattaggacattcaccgagcaagaaatgataattgcaaagcttgagcttcttcagtttgttaagatcatcgcgaggaatgctcttgaagtcgagccgatcaacacgctggccatatttattccgttccacggtctttgggggggatgcaccaggcaccttggaccgaacgacctggaaatcagaagactcgggtttatttgtcatcgaggccaatggagcacccaaatttgacacactggtactggtagaggttcgtgacaaagcaggtgtttggaattgctgggtcggcgatggtgtgagcaaagtccgcgaagggattgcgcttttccaaggagcagcccaagacggtgcactcgttgcactcggtacactcggtgcggtcaatgtaattggagcaatctttgtggtgcggaaaacatccgggaactgggtgatgcgatagtcctgctctcggaaataatcaaattccttctcgagtggaagaccctcaaccagcgagactcggcccttataattcgcgccagaaatgagttctgtcaatgaccgagcatattcttcattggagggacagcccaagaagagctggtggcaatggcagttgtataagtaaagcttaaaagcctctggaggaagagaatcagcaatggtatctttatgtcaggttgtaccacatacccttgattttatcgtgcgctttgtttttgccagttccaacgtccacaatttcgaagaacgatgcactctcattgaatccacgaataaactcattgattgtggaggcctctagggcgattccgccccggatgtaagtctccataagtcccttcacattaagatagatcttggtcattatcttcggctcggtgatcgtggaaagaattgttgtaacgtagctctggagagatttccagagctgcttggccgcattgcgtccaccctgttcccctagttgcagaaattcatctttgaatattattccttcgccgtctaaaagcaacacgacgaatggttcacggtcctagaaggaaacaaaatatgtgtcagcctgagcttagacaaggcgtccacagctgtgctcaccatcattttcttgacaactgatatctggtccatcagctccatttcatgcacctgaacctcacgattgaaccgggtttcgcgttcatggtcgagtttctcttgttgaaaggaattctctagggtggtcacacgttgaagaagttcctatcgcgagtcttgttagagtgaataggggaccaatggaggaattggttggtacctcaatgaagtcattcttctgctggtccagagcgcttagctgacgatagcgctctaaataagcttgagtcgccatttttgtagattgatgagtatcgtttgcagatctggaaatggttggaattgcgaaaaggatgaatgcgacaaaagataaggaagaaagtaaaggaagggagagaagcaagtttcaagtctgatcaaagccaacagggaaattccagtgggcaggcgcttgcaggaggtgacaatctacaaagcgcgtaaagtgttagaatcagcggtaatcaccaattatcagtggccacctcactttattaaattaattgatatagagagagaaatttatagtccgtcgtctttgcttcaaataaaaaatcaatctaagaccgcgggtgccatctggctgagtcagcccccggttttgcatacgtggagccaaatattccccttcacctgatcttgactttgacctttcccctgtttatctcttctctttctctttcttttctctcttccggtttcaagatgactcgctttggtttcctctctttggctctactctctctccaggccttcattggcaccggctttgctgctgtatgtgtttcgtcttgatttgcttcgggaaccatgtcgcatgactcaattgactaattgtttggggttgaactttcaggatactgagaatgctgaagcagaggctcccactctggctgtctcagcacacgcctctttccctgcttccgagatcttcggtatcaagcttgtcaacggtcaccctacccaggcgctgatcgccatctccaacgatgagccgaatcctatcacggtgaactttgtcgggggtagccttcgaaacgctgaagaccaggcgcaagttgtccgcaacttgactgctactcgttatgccattgagattcccgctggcgagaaggagacaatcagctacagcttcgccactgagatgcacccccaggatctccagatgacactttctgccatcatttcagacagtgagggccgcttggttcctatcgttgcccacaatggcaccgttagcatcgtggaggcggataccagcatcttcgacccccagatgtaggacacccccctttacccttggtgtgagagcaacgaggctaacaattacaatcagcattttcctttatttcttcctactggcctgtgtctctggcactggttacttcttctataccgtttgggtcgctccctacttcccccagaagcgcaagtccgcaaagaccagcgagaagcgcacacagggtggctcaaagcgcgctgagaccccagtcacggaggagacttccaccggcgctgcagtttcttctaccagcgcctacaatgctgattggattccctctcaccacatcaaccgccccgaggcccgcaaagtcaagggtcgctcgaaggcccgtgcgtgaatatactcacgacagtcatatcacgaatggaggaaggaaacaatccttttcaatgtgtaccattgtcgggggttttgtctagtgtgagggcggcattagccacggtgctggaaatgcaccctgctgcttgtcacaaaggacatgtatatctaccaaatagaagattttggcccagtttagcttccacggacgccaaacaggatcacttttggagagttcaatccattgtataccacgctgtgcctgttttggcagtactggtatctcacagtttcttccattctttaaattccccctccagatgttgcttcaattccgcaaaccgattcccaaaccccctaccacagcgccagcaagcaaagtctcgttttaggtactcctcttccgtcggattccgtcgcacatcatcttccgccagcgggaagtcctcgattggcacgaagaatggtgtcgaaaagctattgtagtgtttccggtgcttcaagcgctcgctatacctatccaccgataatacatggacatgcaagtggttcatagatggaactgcatgcaccccaaccataatctcctgttcccagtcccgaccccgcggtagctcgtcgggcggcggatcggcgctcagtgccgtctgtctcgcctgctcctgcgcagagtccttcccatatttgcgtcgcagctcgctcgctgccagcttgcgaagtgttcgagtttcggccctcacttttgctaggaagtcggcatcctcaaatgcatcaaatgggtgcattcgtgttttggtctggtcgcgggggagaaggaggaggtgcaacgatgactttgggaacatgtcgtggatcgccacaaaatcgtcattgtggtagaccacgacatcgggagcatatttctcaggctttgtgatgtaggtgcctagtccatcgcgaacaccaaatgcagtcctgcccttggccgcattgcgatcagacggggttttagtcgcgtgtttggattgcttgcttttaggagccaggagttcggtaactgtcaaaccgatatgtcagtcaagtatttttcagtggtacgtctctcggtctttacaggcattcctcttttctgacgtcccagtttgcttctttgggtcagctttggtcggattggagtggtccccggacatggttggtgtggaagtttgactcgtggtcacacaatatatgttagctacagcattgcctttgagcaacaaatccaaatctcacatcggtagaccgagtagtaagagtacaagacatgtgttgggagttaagtctcccatggtcgctgcgctcttccgtatgctccccgcaatcccaaagcggtttagtgcgggtcgctcttttgcttgaagctccaaaaattatctttcgcgcaaacactcaccacgcacaaaatgccacctaagaagaaaggcgatggtaaaggtggccccaagccgggtacaaaacaagccaaagctgtggcagagaaagcggccggcgaagtgaagaagcaagtgccggaggagcccaagaaaccatccgtgaaggatgtcattggcggcgcatcatggacagggaagctaccggtcaatatgttggcagagcactgtcaaaagcaaaagtgggaaaaacctgagtacaacatggtaatcaacttcccatggcactcgtcgcctgtttacaaacacatatatcaaaccagatgctgataggttgcgacaattgcagatcaaaactgccgacggctttgtatcatccgtcacaatgaagaaaatagatcccaagaccaaggaattaatcgtgatcccaccgataaagctccctccctcccataagcaacttgctgggcagccgacagccctcgaagcgcgccatttcgctgcagcgtttgctctgttccgagtgtgcaatatgcgcaatattcatatgatgatgcctccaacttataagaaattgtggaaggaggactttggagaaattaaagcagcagaaactcgggaaggcaagggctggatgtacgaggcagatccattcttagccaagcaagagagagagagcgcggccgccgatttggcaaagaagcgagcggatcgtgaaagagcccaggcaaaggagaaggcctcaaatgcggaattaggactaggaaatggggatgccaggagtaaacgtatctggtcacaagcgcccaaggtggatatgggcacacggattcgacgagatatcgaaggccttttgcggcaacatacagtttggaacccatatggcgtgaagatcccggaaaccgaaaagaaaaccatcgcggacgaattcaccggtctagggtttcgtcgcagccatgtggaagaagctacagcggaatgcaaagaccgcgaagaggtcttggagtggcttctcatctatgttcctgatgatgacctcccacgatggtctctgccggaaggatattcggctggagtcagtcttggttctggtgatctcgcccgtgagggcaaagtcaaacggctggcatctgttggctatccagccgacatgtgctctcaaattttggacaggaagcacggcgacgaattggccgctgctgagcatctgcaaggcactttgacccatggaactcaattctcggccccgtcagtagccgacgaagacgaggaagcttgggcagaagaagcgactacgttagaggctatcttcggggaacgttatcaccgcatatcagccaggatctgcgagatcaacagcgaggcatcggatattccacaaaacacgattttccgcttccaaaagccctccgcccactatccaaccacacctcctgttatatcaatccaggccaagggcgtcccagcctatatacgtcttagtgcgatccgtcgggcagtgcagtatgccgaggaaaactttacgggtgaatctatgattttcaacattatggattggctggaggtcaatctgccgagcatcatggagaacccgggtaaattgcgggagatttccgctgtgacggcttcgtcggtagctgagacccaccaaattcctgtgcgttcgagtaggaagaatcgcagaggcattgactggaagattgactcggaacgaagcttggcgatccgtgatgcttgggaggccaaacaagataccgcgccgcagatcgagatgaatcggaaaagaaaagcacttcctgcatggaatatccaacatgaaataatacactctatcaactcaaaccaggtgactatcatctcgggtgagactggtagtggtaaaagtacacaatccgtacagtttgtgctggacgacatgatccagcgaggactgggagctgctgccaacatcatctgcacgcagccacgacgaatctcggccctgggtcttgccgacagagttagcgatgagcggtgcgcagtagtcggtgatgaagttggatatgtgatccgaggcgagtcgaaagccaaacctggctcaacaaagatcacgtttgtgactactggtgtcttgctgcgccggatgcaatccggtggcgatgcggatggcaatgtcgcaagctccctcgcggacgtatcgcacgtggtggtcgatgaggtccacgagcgaagtctagatacagacttcttattggcgctgctgagggatgttctaaattaccgcaaggacctgaaagtcattctcatgagtgccaccctcgatgctggtatcttcatgagatactttggcagtcagagatccgttggactggtgaacattcctggccgaacattccctgtcgaagactactacctggatgacgttatccggtacacatcatttgcgccagaacttgccgagggctacgaggacgaggaagaaccccctcggggagaagaaacacttggcaaagccctgcggagcttgggcatgggaatcaattatgatttgatcgcagcgactgtcgaatacatcgattctcagctaggaaaccagccaggaggcatcttaatcttcctccctggtacattggagattgataggtgtctgaaggcagtcagtaggatccccgatatgcatcctctgccattacatgcctccttgcttccagccgaacaacgacgagtattccagagcgcgccaagaggaaagcgaaaggttattgccgctacaaacgtcgcggagacctcaatcacaatcgaggatgttgtcgccgtcattgacaccggtcgagtcaaggaaacgagctacgacccaaaggataacatggtccgtctccaagaagtatgggcatcacaagccgcttgcaaacagcgtcgtgggcgagcaggtcgtgtccgtgcaggtatctgctataagctctacacccgcaaagccgaagcaaatatggcccaacgaccagacccagagatccgccgtgttcccctggagcagctgtgtctgtctgtgaaatccatgaaaggcattgacgacgtcgccaccttcctagccaacaccattactccaccggagagcatagccgttgaaggcgcactaagcttcttgcatcgcgtaggcgctctagaccacgacagactcacagcactgggccgctacctctccatgatccccgcggatcttcgctgcgccaagctcatgatctacggctccatcttcggctgcatggaaccctgcctcacaatcgcagccatgctaacagtcaaaagtcccttcgtctcaccacgtgagaaacgcgacgaagctaacgccgccaaagcaaccttctctcgcccgggtgacggtgacctcctcaccgacctctcagcataccaagcctggtccgagcgaactcgcgctcagggcggctactggggcacccagtcgtggtgtgccgccaacttcctctcccaccagacgctgcgcgatatctcctccaaccgcgcgcagttcattacctcgctcaaagacgcaggcgtcctgccaatccagtattccgatgcgtcggcttcggcctggaatcgcaacgcaaccaatcgcaacttgatccgcgcccttgttgctggagccttccaacctcaggtcgcgcagatctcattcccggataagaagttcgccagctcggttactggtaccgtcgaggtggatccggatgctcgcactatcaagtacttcaatcaggagaacggccgtgtcttcattcaccccagctccatcctcttctctgcggctggctatcctagtgccgcggcatatctcagttactttaccaagatggctaccagcaaggtcttcatccgcgacctcacccgtgggttacttctcttcctttcctcggggtatcaccttctaaccttcttttttcttacttgcagctttcaactcgtactccctccttctattctgcggctctatagaactcgacactgtgggtcgtggactagttgtagacggctggctccgtctacgcggctgggcccggatcggcgtacttgtttcgcggcttcgcaccatgctagatgaggctcttacggagcggtttgataatccttcggttgtctccaatggcagcagtcttgctgatagagtgattgaggctgtcaaaaagttgattgagtttaatggacttgatcaataattcgcattggcgggttccgaggttgaaaatacatacagcggatatatcatcttagatgggaaaagaatcgaaatgatttacgagacatccatggttaaaaaataatcatctatacggtttaggctttataccatcttacgccgccttatacttgtcgcaaggtgataagtccggcatgtgtatgtatactctgtactctacagtcgaccgctcgacatactaatggacaatcctccttccaacggcatgcagatcatggggacctagctaaacatagcttcaaaatacttctcgggacttaaagtgagacagacagacttctgtctcctacaaagataaccgaagacctccgcttcccttattatggttcacaaattctacctcggaagatcgaaagctactccaacaacttcttccgaacatccggattacgctgaccacccgcaccttttagagaagttgatgccttcttctattgggcactgatggatccatccaatctcgctaaagtccttatcggtggagagcccttacacccagttgaaggcgttgcttgcaaagttctttcgcgggaaatctgggatcggcttgttgcctatgtgtcgaaaaggaatgagtttcagagtatctatatttattgtcttgatatcgaagaagaaaaggttgaaggtgttgccttgagtagagttacggaatgggagcttcagcctagctggttacagagcagcatttggaaacccaaagtcttgcaagttcacattatctgacagctaagttcttttccggctaagagaacagacctgaagactggatgtcgtacttggaagtgtgtagttaccttgatgtagttatagaaatgggacgtcatattcgactattactagtacagtacaacatacagagtggcgcagagccagtcaggtgacttgtgtagatagagagtgtatcaacggtccccattccccaggggaaaaaaaacgaaaaaaggcggttagaacgcccggagagaaagagatcatcgtcaacgccttccgatcatttactctcatgttcggaaaatgatggcgtcaagtcatgtcgtcgtcagcccagtagagctgggaagaaacaaatccacgaagaaaacaaatgacagaatgaaggagatggaaaagactggaataacacgcaaacgccatgcataaaaaaccgattcgcctgttcacccatgttgaccgaaagaaaaacgagaaataagtttagagatcgtgaatggtggggagtaccagcaatactgaaagccagcttagcattgtatctgcacaccaccggggtattagtttgaggcaaggattagtagtttgcatagccgtccaagcgatctggatcattgagatcagagggctcgggcaaaacaaagtcggaggcaagcccagtttcgacaaagatcgaggcatgcttgaaacgacgatccgaatacttttcaaatatggcggcgtggtggcggcgagggttctcacagcattccatcagtgtgacgagtactggaatcagctgggaataaagataaccactgtaaaatgcgtgtgccggtgtctgattttgaatgttagcaatatgataattgaatgggttggagaagaaaacgtacccagttgcccttgttaagcagcatgcgagacaggcaatgggctccagcagcaataaagctagggggagtgcagacaaagcgctcatccataatagccagctcaaggaagtatttggcaacagtacgagtttcaaggtcgtattcatcagccttgctaatacggcgaaggaaactcatagggccaggccatccaagatcaaagtcgaggatggtgagcatgaaccgttctgccttcagaatctcgtcgacggaatatccaccgtcaaccatgtaaacgatctcttgcacggacggggctgtaatctcttcgaattttgcagcaatgaagattgctgtcgccccaacaagctgcaatttgcccatagaaactaccttgtacgacaggaaacggtcgatgtagtttactgtgaggaacagagtttcagggagcaagttaaagcgcccatgaacttgaacaagccagtccatcaaaaccgcgcgcatggaccactggagttcgctttgacgggccatgtaatcgggaaccggaagcatctcgatctacagacatggttagttcaagctggttatcaggcattgggagagtaaaacatacctctttctttcttagatgaaggaaaatttcatcgccatactccgcgaccatggtcgtatctaaaagttcctcctcaatatcttctggtgtctgttcgctttcgacgatgtctttcgcccggaacatctcacgagtggtcacattgctcatgcatggataaatgacggtggttccgtcggcgttatccccacggaaggagtagaagggtgcaacattgtactcggtatcatccccatcccattcctcgggctcagataccgccggcacgggttccttgacgtatgtgtatgtgtactctttcagatcttcggtctcggaaacggtggcatcagactccacgaggctggcggtatcaacgttcagcacgtttgaaggccgcactacaatactattcaaatgacgccctttctccactcccttgtggctggtcttggcatctgtgtctgtgttggtttccttggatgcagttttctcgggaacggtatgcaattggtctttgaatacggcgttgtttcgcttcgatttatacgccggttgggccttaccggcggggttcataggctttgttgtggcaacgctttcaataacacccttagttcctgccaaggtcatgcgacgttgggctggctgggacagtccaggagccttaacctcaactagagcaggctttccaccaacggcggagtcatcccgactagctcggttcatatccttggtgttgctaacatcgacgaatgcgcgtcggccagcattgttctgggccatcatactcagagcggggctcgatttgttgcgctggtggatgaccttatgattttgatgcagagacgaagggggcacgttctcatccccaacgactcggaagcgctgtggctgtaacatcagttagcatcaatatctccaagttctccaagtgtggtttaggatgaagcaactctagaccaaaagtgggcgaatacacgacaatgcgacaacgcggcgccgctttacgcgattgacgcgtaggtacagaagaatcgggcaaaccagaccataaacatagagctgacttacctttgcatccatgatcgtgaacaatgaagttgcaagacgtgagtgtcgagtctaccttgaagttggtagagagatgttgtttactttttgctcagttggggggagcggagttgcccggcgtgattggccagcccaggcaaaataaacagtcgataggacccgctcactcgttccttcccgatctagcccagtttgtcacttgaatgttacctaggcagaataggtaactttatagaactgactgaacaagtgaatgagcgagaatggaagtgacaaccgtgaagaagggagggttgtcccttgttcctaaagatgtgccttgttgacaatgcacgctattcctaaattggaggttacggtggcgcacgccatcctactgtgcaaactgccctgcgactgttatgcacgcctgtgtcatcatatgtatgctaggctcaaagtttatggaagttttgattaaataatatagagaacatcgaagggaagatctgagtttattttacctttatttgagccctatttgccggtttctcagtcgaatgtctagactagataggtctatcaacctatagttattgaaggcaaatttgcaagataaataccatggtacctctaattagcttctggggtatcaattttatacattgttcatcatcctagtgagaatatgtacattgtaatcatgaccttgtcaaattgatatcaacctttcaaggttccatggttacaactttccgaggtcgaggactcgggacgttgatagaatgttaaatgtttgttctgtttgtctatggtttgcattgtttggtacatctttgacgtcattaaccttatcggcgcgtctcctgcgacgtctgtcgaacatcgtttttgattaaagaaccacgaaaacaagattagatattactaaaaagttatctccaagtacattcaatagtaatgcatagttaccgacaataatatcccaaaataattcatgtttgcgagtacaatcgccattttatatcataatctagatctgacgcgctatctacacgagaccacgtgagagctacaccgccgtcacaagaggtgggacacccggaatgaagcggttcctgtttggcagctttgtgctcaaccgaaacccactcctatcattgcgacggtcgtcggcttttccagtctcgccaagtggtgcggggcttcagatcagaggcaatgagcagtttcggagtaaattatagacagtagccacgttctcggatccgatgatcttcatcgtcaacatatccaaaggaccttttgcgcccagtctctcagcatcaccgcctgactccaccaagcagaaatgttccccccttttcatcgcctattttcttgagaaatcactaaaactgtgcaatcacggatttgcgatgtcccgatctcacttttgtagccaggttccaaggagaaaggaatgatctgtaacgccgatgcgggattccctttttaaccttcttacataggtccgaggaggggtaaatccatgttgcagatcatgcgagacaactccagagagtcatgcgatattatgaaagagaatattctgggtattgaaacggtttggttctttcggtgatatcctttcggctgagtataaatatctaggtccggtcctctaggcggatcaacaaaacgtccataaaccaccctaccctagcgattttgctattaaaccacattataagtgtcgcgatatcttgtattttccaattcgcatagtaaatgagcaatgcgacaagggtgatggtgggaaaatgactggacaatgtcaattctgtccaagcgcacacctccacaacagaccaaaaaaaggtatgggttgctacgtggtcacgctaggaactagctgcaagcccataaatctattgggcgctattcctttatcttattttacacccttagccctcgataccctagatagttacttgtagcgatagttagaggtacccaagctacttgctttgtgtgaagcgctgcatcctcccctccccaacagtcttaggtagcccacactcgcttacacttcatccctcaagactcaaagatcggattatattctcaatttcgtacataatatacaagaaggagggttagacaaagtgttccgtcactcggcgcaatggcatccggcttgcgacagcttttgcgcctttgcgaaaagatacagcattgggatggcttcacacatagttatttttttcgatgcatagaatagttgcaaatcaaatgaagattttatatatattcattaatgccatgggatgtgatggctgcatcgatgggcgccggaagcgcaaatcgccatgtcaccgactcaggcaggccgttttctcgctttaggtgaaaccatcgtacgcacccacctcaaccttcttccttccatccaacaacccctcgaacaaatcgccatcagcgctgtcaacagtattgggtatgtgtctctactctcgttcgatctcacttttcactcccctgaccccgttttaatcctggagatgccaccactgacatagcctcagcgcttcgtagaattgacaatcccctctcgacctcgaccgaacccatccttcgacccttcgccctgtcttggacaatccaggtatctgcgatactggaagtctctgtttgagttgaattaggtgtgttgaaatatctctccattcttctccgggtcatctcgcttgcttcccccaagcccgcctccaaggtcggccggactcggttagcgacacatccatccatcatcttccaagacacaagccatccttattgtatattcgagcatttggaaccccattgtgttaacctctatggtctgttttccttcaggttgcccacatttacccttctgagtcgcttccggctcttgcgactgcagattcccctcccacctccatcgaaggttttgcttcgacggtctctatatttctatatttctatacatcaagaccgggggtggtccatccaccagcctgatcgtttgaattcaacaattgtggtaggtttgatggattcttccctctacacctgcccttcctctgtgtcttgccatggatcacattcccgccctctacggcacacaagcagtgggttgatgcagaatttggtatagcagtggagtattactcaatttggaacactttgatatgcaaccggttcagcatgaagggctttctggcctggtcgagcagccgggtctggcagactctgccaatgtagctcgagacctgtcgctgaaaggcccagcacccaagaatatcgcctttgagttacttcttgatgagaactccaaagtccgagctcgtattccgatgcgcgttcaaatctatccccatgataccacggactcgatcgtcacaacggtcaaaaatttctatggaatatatgacggtactgccagtggggtcagcttcgaggatgaacatgggaccaccctcatcgcaaggtacgagaatctcaagaacaatcggactgtatacgtgcgagtcattcccattcaaccatatggggatcacttctataacgggttcaatgtcgagcctcgcaagcgacccagtctggcggagcctttccagatgttagatggaacgtcgccggcgttagatcagccaggacggccatcctctcggcttgcgagaaagcgcagcacctctccgtcgaaccggagtctccgcagcgcttctcagcacaagcctccctcccgcgcgggcaacaaaagccgggcctcgagcacccatggagctttccatgatgatgatgactacagcgataccgagagcgcttatgctcgcagggctcgcaatgagctctttgctagctcggatatcagcatggagaatatactacaagatggtcgtcgcaaacgacccaagttcgatagctctgtgagtgactcatacgagagggtttttctctatcaaagactgtcgttaatcaatatgttccccttaggagctccccctgtttgttcctccccaagtgccccttactacctccacttcttccatctctccccagcgtcgatcgattggccaggatggcgctgggtcgcctttcgcacgcccaccgcaacccccgtatagttatcaacatgcgcttccatcgccgcagagctatggccacagcgaatatggtgtccactcggggcgcaatacgatttatgcgactcccgtggttccagaccatggaaatcgcatgcgcgacacgggagcctataacagctcggctagccgagtgagtggtccaggtatattgcccacacctgaccccactattgcaagctgcatctccgatgaggatgtggcgatgcaattgatacgcttgggcgatgcgtccaatttctctcacggacgcacctctgcctcgacattggacgatgctttcagtggtgccgctgacgctgcctcatccactggtgctacaagcgatggggaagactttagcgaggacgaggacgacttgccagctcgtcgccagaggttggactccagcccaatgctgccgccgggaaccatcaagcgccacctcaagggcctggatgacatccttcccagcgccgatagcagcgaccacagctcggatggtgcagatgatggtatcaaaagtgaagcggaggaggatatcctttacaaggagtttgcacctaaggcaaagaagccgaaaagccgccccacatctttcaaggttcgcagccagaagcctgcgcctgcgaaattgaacaaaagcaagaatgctatgcccgctcctcgcaaatcatccgagaagtcggctgcgcctgttccacctctcagcccggcgtcttcccgaaaggtctcggggggctcagtcaacttccagcaccagctcggtgcggatgaggaagatctttctaccaagcctcgctgtcagcgatgccgcaagagcaagaaaggctgtgatcgtcagcgcccctgtggacgttgcaaggatgcaggcattggaattgacggctgtctcagtgaggatgagggcaatggtcgcaaagggcgctacggtcgtcatatgggtgtccccgtgaagaagaacggggaagaaatggatgaagacgaggaggagttttcattaacgcctgcgacccctcccgtctcttcgtctatagcagacaagaataagaagcggaagcgctagtggagctgcaggttgcaattgcccccgctatctctaagcgccgaactgtttcgcacctccaatcttcttcgtgaccatggggtctctcattcatcttaccatcctcactatgggccaatctcatccaccctcactctctcatttcgccttcttctggccagcgccagagacagtccttatactagcatcatcatttgcgcttctcactacacattcccttctctggttacaagccatgcttcctccattgtacactgccaagcggttgatctattgttgttgtgtctcttcggcgtcttagtgtttctgtggctatatgcttcttgtcacatccactcgctcattcggaatcaatgctactgggttatttatcattgtctatgtcggtttcatgtgtgtggtgtacggatcagtagcggaagcattatatacttccgagggatggcgaggtcaaagcgtgacaagttgtagaacatatggccgatctcgacctatttcgtcttccgggtagttagggagtcaatgaaagggtttcaaatttttattttgcacttcaatcttccgacgttccatttagtcgtctcatcatggcttaagttacatggagacatggcgggatgagtcacatgacaagagcggtgtgattggccccgcaacttttttaaagagcttaactttctcgaacctcaaaacgcttgcattcttttgccaaacggcgtgttgcttatttctagttgcattttcgcttttaacgggaacagaatttaggtatcccagcgctgagactgcatgtaacgcggtgcgcaaaccagcccctctacacgaacttttctccaaccgcccagcaagccgcattaagcgccttgtctgaaaagcgaccacaatgcctcccaaagctgcctctcgtggaagcgcccgtggaggggccgccaaccgtggtgctcgaaccgacacaactactcctactcccgctggcggggacactacgcaaaatgctcccacggcaactagcgcgcccggtcctgcgagtcgagcctcagtacaacggcttcaatcactgaacaaacgcacaccctccggcagtatcgcgcccagcagtcggcctccatccgcgcttggtggtgagccggccaaaccagtcatgaaacacaaaccgaaggccgttggacgtcgcagcaagcaggagcgagatgagatagagagacttgaacaagaacgatacaatgagcgtctgaaggaggctgccgctatccaacgtggccgtggcggtactgctcgtcgtgctgggttccgtggccgtggtggacctatggctatgggcatgagtggatttggtggccgaggcgggaaacgaggccgtggtggttatggcggcggaagtggaggtggttatggaggaagcgcaggcggtgcaggatcaggatacaatcggtctggtcttactggggtcaaccgtgggcgcgcatatgactcttcagacgacgaagagaatgcactccgtgtcagcatcgatcatatcaacctcgatagcgacgaggaggattgggatacgccgaaggatttcaagggcaaacaacctagcaggtcgagcggggaacgcggacttcgccctgttcgtgttgagcgacatgaacacgaggaaagagtcatcagcgtcaacatggaatctagcaccagcagaaccgccgacctccgcaaaaaagcagagaaggagaaagcagcgaaggatgtcggccgtacacctaccaaggttaaacccgaaccccgagacgacgatacaactatgccggatgccattccacatgcagatgacgatgacctcctaccagagcataatgttcgtgtgcgctcggctcagagcatgagcccaacaaagaggagcacaacagaattacgatcgattcaacccacgcctgagcccgaaatcccagacccacgcagcctacttcacactaaggaggaaatcgacgaatatgaccgacacatggaagatttggctataattaaggatcttcttgttcccaaggagtcaaagaatgccactacagaagcagaaactaccgaaggagctgccgaaggtaaacccgcggcagtggaaggacaggaaggtgaccaaccgaacgaagaaaaggaagaagaacaggaagaagacaaccctctacatggccagatgttcctcatgcaattcccaccgatgaccccctacctcagagtcgccggttcttcccaagacaatcaacaccaagctgcagcaaccgcacctccgccgaacgagatcaagcgtgaagcgggcgacgacgtggaaattgtgggcagcacccaagcaaccgaattaaaagagaacagtgtcattacagccggccatccatggtctttgcccacaggtcgtgtcggcaaattgaatgtacaccagtccggccgtgtgaccctagattggggtggaatcagtatggagttggatcgtggagcaccggttggtttcgtccaggaagccgtcatcttgtcgaaggttccaccggagtcggaagaagacataccaaaacatgtttggtctatgggccaattatctggcaagttcacagtcacgccgaactgggatgagatgctttgatacctctacaaggcatcttatgatgaatggaaaagaaatttgcaagcttactgcagcaattgtcttggttgttaacttgacaatcaccaaaaatagttagactggggtaaagtttcccttttcctcctcaagaattcaactttgaatcccatctgtagtcacgtgactatttttatatgtatgtgcaggattgcgatagagatagctagttgtctctgctcgttctttctctcccagtctctcttcgtagctaagagaaaaatacaactgtattgcacgctatattccaacttttgtgtgactttacaatggctgcggaccagcttagtaatttcaccaaaagtgccaaggcctagttaactatcgcgcaagctgctccgtacacgaactttatttgcgcgtgtcgaattcagagcatttgaccattacatcctccatgcccaatagcaactacggtcgagcacaagcgacaattcagccaatccaactactcataatccctctacaatgcctgcatagaccaaatcaagtgtctccggtgctacacgagtgacgaaccttcgccatgtcgttgcgtcctctcggatatcaatgcaaactcccctatgcgcaattattccgcaatggactgcaaacaaaacaaaatatcacacaacacctgagatccttttctcaattacgcgacacccattgcgcacgtcgctggtccgcgacatttccacaccatgccaacaaagctttttcgctacggagcttgctcggtgatcttttgagacctgcacacactattcggggccagggcaagggattgtgggctcaacaatctcgctatgagagctctgcggccaaagaaccagaactctgcgcacactgcggtggaaaaaccatccccaaggctagaaaacatgtcgagcctggcaacccctccagcggctggtattgcaaaccctgtgttcggaacatccgtgcccatggccatctgccaaatgaggagcagcttgcaggcatccatcggcggaggttgatcagggcgagtggagaggcaagcaaaacaagcccatgcgggcactgcggccagatgacagctccgagaagcagccgtaaattcattgatgcgaacaacccttctgctgggtttcactgtcggacatgcgttcggcatgtcaatcatcacggtaccctcccaaccgacttagatctcgcagcgttccagtaccgcaaacagatgcggagtaggcgtcctcctactgttgcctcaaaaaataacaagtcagttacttcgaccggagaatcagcagtggcccgcaaacattccaagtctcccaaacagatgaaacagagccgcggcgaatacccttgcatgcactgtggtgacaaaaccatctctagcagcaaacgaaggctcgttgagccccagaatcccgcggcaggttactactgccagccatgtacacgatctctacttgaaacggatgccttgccaagcaccgtcaaaattgcagcgctcaggaaactcagagcgacccgtatgcaaagcaacccacgagttatgaaaagcccttgtgtccactgcggtgagatcaccgcccccagcagcaagcgccggctagttgaagcgaagaacgctcaatccgggtattactgccgcgcctgtgcggactgtttaatagaaaccaattccctgcctagcgacatacgccttgcagttcgcagagcgcgagagcaggtcaggctgaaaaacttgcaagccagtctatctaaagaatcgcagtccccggtatctccgcaggacggagaagctacgccaacggatattctcacggacaataccgcaaagacttgcgcgcactgcagaaccgaagagaacacgtcggaccactgaacccggatatgtgtttttgtgtgtggagctttttgatctcaacggcttgtttttgaggctgggggtacttttgcgcagagaccgcatgaaaaaaaagtacggactcggattagagcggatatcaaggctggtcaacggttggattgctgccagtgcaccgcgtgctcaaatcgatggccgtcctttgatctggtcgatgccaagcgcaagggtcttcatatcttgattttagtaccacccataaatgcgcgtcgtcatcttgcctgcggggtgtgctcgtctattcgcccggactttgcgcctgcgttgacgatcctgagtggcgctgtccgttaagcctcgggatgccttggagctataattagaacttggcggaacaaaatgggatttttattgtatatacagggggtggacatgtatgctatagatgcatatgtcaataggcatctggaattattgaatcaccctaacagcagcgcatctaagaagatatcccgactaaaataaagaataataaagaataaataaacactttggatagcttcagacctgggaaactgggtaaccaatcagagctcgcagaattcagggacacacccccactcctggacggcccagggacacagggccaaagaaagccaaagagcggctcggccaatcagagcctcggcctgactggcttcattttgtttttcccttaatttccctttcccccccctgggctgtttcggctttttgggttcttgttcttcttcgttctctctttcaatcctcctctacggctaagagtgagttgggttctgacaattgaaagagtaaagacgaaataccccggatactcccctcttccgtgtttggccccctattcccccggttgcctgactgcgacaattcaacacacccactcggacctgagtggcatgctttgagatcctcgcaacttataccttatattcgtgaagacattcatctgagtcatatcgtcacttccaacctcttctccacctccatctgcagactgcagcactgttgccttgccaactccagaccccccgatccccacgacccgcaccagtcagcttggcgttgcttgtcctccataggcaacaacgcaaagcatttgcgcgccagtctattttcatacactatacatctataatctgccacaatgaaaccatccaccttcctggtcttccttgccccggccgcggtgctcgccggctcacaacaacccgccgcaggtgccagcctctcctccgacattgcacacaattcgcccgctgtctcattaccagaactcgctccgcgggaacagttcgcaccatttgcggaccatgatctgccatctgatgagatgcgcttgctcgctgctcgctatgtcctccgcgcgcgcagtgagggctccctcggccagaccccatggattggcatggcgatcggattgacctttactgctctggcggctgtcatgctcgggtgattgtcggcatggaatgctttgaaacgaaccctagctcgactgatccatatacctctttctccgcctcgactacttctttttctcttgacacgacacgtgaaacgccgggcaccgctcgaactctgtttatcttttactccgctcgacatatttctgcgacccttcttctttatcttcattttcttatggtcttttgcagcgaatttttaccattttgtttatttttgcatccatggccttgtgttctggcgtgggattggatctttgagcccccttttttacctatcgcattccccgacttgctgagttacttggtactgttgggagtatagagttacatgttgtacgcatgttgtacatgatacctttttgtttctaatgcagattctcccgtgtgtatgacctaattagtatatatagatatggccaatacgaactgactatacgtttttgcttttcttccttttctttcagaccacatttttcttagtttacgcctttctcatggctagactcggactggggatggctttctttgttactagatgagcaacccattgccagggcaaacacagagttctcgagaactgtcatattgatattttggtttccttcaaatctattttcaaatacccttagaaagagagatctttaagtgggcatataccctcgctacactcgaccccaaagacaactatactacagccctaactttcaccatggcctcggacaaatatccaccctacgtaccgatgccctcgctccgccacgagctagggctggtgttcggcttcttatctctgtgcatagtggttatgggagcatacgttgctctctggcgtggtgagttcccctcccactctcctttccatcatatatcgatgtaaagatcagcaagaccgtccgtggtcatgtcaaacacatacgtacatacaacttcaatgcgatttacttcagcataatacctacactacccctaacagccagccccagtatcccaaacccgcttagacgcccaagacctcgcccgccgcaaagcctttcgcagcaaaaccccaacccaacaacccctaggaacaaaaccccccttaacagcaggccgaagcccaagtcccatcaaagacacatccacctcaaactccaaagcagctgtgcaagaaaaaatgctcgaccgcgtcggcatgcccgagaaccgtgccgagctaccagtccacgggatggaggtgtacgcggctggaaaggggaatgcgagcacatcgcaaatcagaagtccacttggtcaggctatgccgcttagtattgttagtcctgttggtccgcttgggggtagcggggttgcgggtagggctgctagctctgttagtctagttggaggtgggattgcgcttgagtctattgttggggtggcgttgaaggagggagaagtttgagtcgaagtcctttgcgcgttgatgggttccggtcggtgagtccggcgagaaggtttgggggtggaattggtccacctgttgagattgggcctgcgcctagtagggagtaaggtgttgcattagtttataatgatgtaacatattattttgtatcgcagctaggagcaattaatatgacaaggagaacgctaagagaagtaaattttagactaagtccacaatgagagataatatttgtaatcggtcgatgaatgtatgtaccttgaaagaagaagaaattcgggatagggttatgcgggtcagaagtgtgaatagcttcaagtgatcccaaaggagaaaaaaaggaccccagaggttcttcaacagcagctagcctagggacagtttcctcgttggtattggactaatctcaccctgctcgaggaacagagcacatcccatctgagccatgggtgttgggaattacaatatctgccttgacctttctatttataatcacttttgtttatcgttccttcctcggcaaatacccaggaccgctcttgtctgggagcagcccttcctgccattccaacaattgtcgtaccttctaagattccttctcttctactgagttccacgtcatgcatggcctactaagctttctggaagtatggcggtttgatgctttggaaaaattttgatattgtctccaagggttgtccatatcaattcaactcatatagttgacattttgaatccttctgggtatattttacattacattacaccaccagtcatctatccacacacaggctcgtcaaacccacgcgtccacaacaacgaacccatgatgaccaccaaaaacccaagcgcgacaagcacactggcacttccatacaaatacgcatgacgccgatgagacagtcctttcaattcagcaacccaggtactgatagtggtcgtgctcccgcagaatccatccataacaccctgcagcacctggcaacctgtcagagcagcaggaaccgccgccccaagatcactgacatgctgcaagtcatagcacataccctcgatgatggtcccaaagatattgaccgtaaacgtgccgagggggaaggtcggaatcctgccattcaggtgcagcgagacatagaaccgaaggagacagccaagcggtgaaaagacaatagcgaacaccgcccggccgcgccacacatccgggcctttatgtcggtctggcggccagatggccaggaacaccgccccgagccaacatccccaggcaagcatgaccacaagagggtcgaggactcggcgcgtgaacgcgaagggcacggtgggtgtcacgcgtgttagagccagggcaatatgcgcgccgacgataagtgccgacaggctcagtgacacggtgagtataatcacagcgaccagcgccataaagctatacccaccattacgggaggcaatgtgagatccggttggcagggatgggtcggggagggcatttgccagggcgaggaagacgtcccgcataaaggacgagaaggaggtgaagcagccacagaacccggtcgtcagaccaatgtacagagggatagtcttcttcacagccatgtgtttccggcttttgactttgggctcggtatcaactgcatctgcaggtgcttctttggttattgttttgccccattcttcgcggaataactgctggtcttcgctcaggaaacccattaccaggcttccggctacatttgcccataacacccctgttacgacaggcgcgcctgtataaaatgtcagagcctgtaggcctaggcgggccagtgtaccccagagcgagaagaagattagataggagacggtgtagatgtgggttgcgtgtttggagaggggcggcgcagcagatgcaggttgtggtacaggtgctgcgcggtcacccgagttttgccatgattcatttgcattcgcctgtcgggcctctcttgaagggtcattgtttcgagaggggttatcaacatcggcagttgatggcattgctgtttcagtgttgaagggaggataaggggaaaagtttgccaagaaccggagaccggagatcaggtggagtccgataagattagcggtcattcgcagagtatatgaggggaagaagataaagaggtgtgtcttgtctccctcctcctcctcctcttcttcttcttcttctctctctctctctctctctttcctctttcctctttatataccctctatacttcaccatgtctctcccatcaaatgtccacgtctcctcccatccctgtctacaagccaagctctccctcatccgctcatcttccaccaccccgcgtgagacaagaggcttggtccatgacattgccaatatcctaggcgttgaagccttctcagggctgaagttagtcaaaacaggaacggtaaatagatccccaagaccgagatccataccagcattgcgatctcctaacactcattcccaggacaccacgcccctcggaatcgagtatgaaacccagggcattgacccattagacctagctctagtgccaattctccgctctggtctaggaatggttgatggtgagtgattcttctattccgcgtgatccgctctagccagcactgcaactgtagcccatgttattccctgcaatatgaccatactactctcctattccccaattcccattcctatatccaatcccaaacaccacagttgcaatttcattcgcatttacagcttatctcctcctttcgtcatcccccccactccctatccttatcccccactcctaacacgtccacgggtccaaaaccccgcttacacaaccccacagccctaaacgacctcctcccaacctcagtcccagtctaccacctgggcctgttccgcgaaaaggtctctcttcaacccgtagaatactacaacaacctccccttccaccggtcggagctgtcgccggcctcgccagcttctctgaacccaaccaccaacaccgcagcggcaagcctggcggtgctgctagatccggttatcgctactggtgcgacggccgaggcggcgatccaattgctgcgcgattggggtgtgaagaaggttattatgcttagcttgcttgcttcggaagagggggttaagcgtgctgcggggacttggggtgatgttgaggtttgggtcggtgctattgataagggtgttgatgagaagggcatgatcgtgcctggtattggtgatattggtgatcgcttgtttgttgctgttggaaagtagacttaactttatcagcagtgaagcatggctgttgagggtttagatactacagatgattatgtacctaccactacaactacaacttcgctacaaatgatcaaggctttaaactacaattgaagtctacaatctagtatttaggaaagaggttgtccccgccagataattcatcgataacgtatagtacatggaaatggcataaaacatgtgcaggtgaaacaaatgcgaaaattgtcaaagcaatgctgagcgttaagagcatggaaagcaaaagacggggtcggaggcgcgcagacaattaacatcaagtacagcggctggaagccaaccaaagaaatagaggtaagtggcaagatatgagaaagaaagaaaaaagaaatcaacacgcacgcgaacgcatgaaaagtcaaaaggtatcgaaagcacgaaaatcagatggacggggggcacgattaggggttagtatgaaccataaagtcaaactccacggagtgcgaaagtacacacaggaccagccaggtgtcgaagacggaaagcagaaacaccacactggactccctggtgtaataaaaagcaggggaaatgcaaaaaaaagcaaaaaaaaagcaaagactaggaaccaccgagagggatatcaaaaggcgaagtattccaaaacaagcccaacaccccgcctgcccactggcatgtccagtcctagttccgaggtgtcccaatgaaagcgtccaacaaatgagagtaagaaattgaaaacacaaatttcaagaaaaaagcagaccgactcaaacagattgaagagaaaaaatttagtatgcggtgccgacgctagcaagcgacttagttggcaccgcatggatcggctgatccttgcgaacacggagagaatcttcgtatccgaccagggcctgagagtgaagcttgaatgattcgcccatcaacttggtgattctgtaaagcggttagttactggaccataagagtgaatagggatgaaaacgtacccccagacaaccacgccgtctaggatgttaccccatacacgggcgacagtagagctgagttttccaaaggcgtcgatggcatcgtcgtcaaacagattgcggaccttgttgtagagggccaattcagcctcagttgccggctcatcgtcatgttccagacggtagagccagaggctcagaatgaccatcagatccaggccgcacagagggttctcaacactccagttggtggcagatgtcttggcaacccaattgatgccctgaatggcggcaatctcgatgcattcgaaacattgttggataactttgttcatctcctgcgaacgcttgaccttctcacgagcgacggtcatcgcagccgccacctcatatgaggagtggtaccgcatcgcctcctggatggatttaaggtcaacttccaggcgggcgcgggtgttgcggtagaccgccatcgagttgaagatcaaggggtgacccttctgaggggtgctaagcgggaccacgatcgtttccggttcgcacacctcaagggagttctcccaggtctcgagggccaggcgcagcttgtactcggtaaccacatcttggagcgcctcgaagctgcgcttgtggctccaaacttgcaagaacaaggcgttaatgagaacacgagtggcgaaagcactgtagcgtgtctgttcaccctggaaaaggcagtcgtgggcctcacgcacagtcaaggcgctcgagaccgtgccacggcgccaactctcatcatcagcctcgtccaaattccagagagactctgaagatgggagctccaagtcgtcaaactcatcgaagctcatagcgggggtgtgattgaatgtgagggtcaacatgccgaagaaaatatacacggcgaaatatgtacgacggcaggattcgtcctcaatccactcctcgcgcgatggctggacattctggcgcgcctgagtgcgcaacttgagctggtatcggttgccggcgaccatgttggccaggagactcttgatcgaacaagtccattcaaggcccttcgggtcaccactccagctctcaaataccatgttcaacaaagtagcctgcatcaatgtcaaggggcacttgcgggaatcaaaattgtccttgtgttgcaggaattggttgaccaggaccttggagccgacgtggagcatgaaggcgtgttcgcgctcgaaagtgtaaagagcaccaatcgacaaaaccgcaagcaacagcggggctggaacttgggaaggcttaaatgattcctggtgcaggaatggcaagtgaggatggtacagattaaagtaggtggacaaataccggttcagcgcaaccgtggaaggaagctggaaagtatctggaagcgcacctaggctgtctgatccctgaatccgatcaactacatagttgcgttccatctcgttagcgagctggggagccttgggaagagtcaacgcctgactagggccaggtgagcgacggtagttgaccgggctgaccggaccagtcatggaggggtagggcgacagcgcattcggggtagagtgccccgacataggcagcgagttggacatcagaaggtcgccgacagggccatggcgatcaacgagggtgggcatcgaccccggttccgcgggggatatgagcgtgtcccagggcatctgaggcagagtggcgttgcccgagaggtagggctcgaaggagccgcgtcctggcgaaagcgattcggaacgctcggagacctgaccggtcgccgctgctgcagccttatgttggaaatctgtcatcaacatggctgcagtttcaaggtcgaccataccatcattgctgctagcctcgatctgctccagggtcgtcgggtcaatggtgaccgacggccgagctggggcagatgagtttttctgaacccctccaccgcgtctgcgtccctctgcaaccagggggataccgccatccttggcgtgcaccgttctgtcatgtcgcagaagaagatcgcgacggacgaaggtactgcggcattttaaacacttgaagggtctttctttcgtgtctatacattttcgagtctattagcggggggggaaacaaaataacacatagggaatgttggcaatcttacgtgagcgctcatggcgactgcgatgttcacttctgctaaacgcgcgattgcaaaattggcacttatatttcttttctggagctgatgttttcttggccggtgagttggccgtcccaggtgctgaaggtgccatgtgtgcgggttatctcttagcaagagagtagaatggacggtggtattgtcccctgagtaagctcgcaccggttctgtaggcgtgtcgatgacaggatttcgttgggatgtctgatcattccttgagcggggggaaagggaagtaaaggtatatcgagagtggtgtccagccacaagtaggaaatattaaagaagcaaacgctgaagggaaaaaaagaatggcgggatgatcaaccgcgattagatgaggaaaggggaggggaagaagagaggggaaggaggatgaggagaataagaaggaatttgggagttgggaaatcgggttttttggttttggggggggnnnnnnnnnnnnnnnnnnnnnnnnnnnnnnnnnnnnnnnnnnnnnnnnnnnnnnnnnnnnnnnnnnnnnnnnnnnnnnnnnnnnnnnnnnnnnnnnnnnnnnnnnnnnnnnnnnnnnnnnnnnnnnnnnnnnnnnnnnnnnnnnnnnnnnnnnnnnnnnnggggtggagggggagaggggaggaagggaggggggggaagggaaaaggacgtgggtttaagctaatcgcttacttttacgcgtcgaagtacagaccagggccatccgagggtaaaagcgggaccgatcaccgcgagaatcaccgccgagcttatcatcgcgctacctaggtatcccagccacctctccggccacgcactttaccttcctctgtccacccactatcttactcaaatgtgccccccctttctttaccatacaacatacggaatcgacacgtaattattctaaaaaagccctatagatttgtcccgatcgcaagcccacatggtctaatttgattttccccttggatctttattatcataattaaacactacagggtcgatcatttaaatgtttttagaaattgctgcgagggtgatttacatgtactccgttgtgggttaggttattgaatcgtgcccctcgctcagggtttttatggggacgggggaaattctttgtttatcgaaattatgtggcatgtgaggcgattcgatcgtggcacacttggagaggctgtgagaatagccccttattcactaatctcggaggtttccccctacagggggagtatatcagtctcacctgagaaacctggaaaagggtatcgtacggtttgatatcagaccctagacattgatagatcgcaactatggttcacatccgttttacccctcaacccctccagtcccaagatccacagacaacatccatggatacatacatctatatcaatttctagggcataactaccgacgctggtatactgcttacatttataatatcgttgtcacacaactccgaatctataatctatgcttggagaatgagacagggatatcagatatagagttgcatttatcttctctgaatgtaagaatgccgatgctgagaatggcactttgatgcgctggagtatacacatccccacgctaaaatagttacaccaatgtgggaaagtagatcgatccaacatgaaatcaattctatgtctgggtgcccatcagccccgtctcctgacagatcatcccactgtacttttgtcgcctcacaaattggctggtccagattcagtctcagctgtcgccctccaaccctaatatagttgcccccgccctgtggctgttcatctgtttgactgtgccacgctcgagattatgtgttccagccgtgtacaactgcattatgtaggattgatgtaagtaccctgtattgtcctcgaggcatcacctgccgaactacatccagaaaggatcgacagagcagaatgcaaatcggagcgttggatgggcatcttctgattgactagttgtacgttgtccttttagtttgcattgccagcacaaacgattacggctaaccgcgctacaaatgctatactacggccgaatgcctagttagctgtcaaatctttcgaggctccacacggtgaagttgcagttttatacaccgcaaaacctgccagtcatgtgtactctccgctccaaagtaacaccgttacctatcaccgagctggaaattgggaatcgcgagttcccgggtcctatcagtggggcgaagccaacacttacatcattggagcccgaagatcccggacgcggaccaccgacgcggttacttgggaaacgcgcttcgaacacggcacgtctctttcacctggacaagcaaatggagttggaattagcacaagtttcacctcatatcgaccggcatatggagtcctatctagcctgtacctgagcacccccttgattcgcggaagccaaatccctaaatcctgtcccggacttccggttgatcatcgaagcctgggcgaaacttcatctgatctggtggatctagacttatcaactagcttcaagccccggcggtgaggtcggacggcttaggtttttcaccaagggatcaaaaccttcgattcttgatgcaaacccaaccggtcgacctccttcgagctgctgctcggtccacttcccgatgcagcggaccgacccagtctaacgctctcgacccaggaacgaaaagcaaaacaagttggcaatgatatcaaacggagagcggtgacttgaccgcctggcaaatactttattccttccttgcctcgaaaggtaatacaccagaggatccaccattcccaatcccttgggccgcaagtccgggttatgtctttggtctttcattccatgcccctccgagcggtcaaaagcacgaacaaaagaaccatcgaaaacccgcccaattatggatctgcacggaggatccaatcggaccagttacgaatcagatattttcgaccattctcccttcgagctctgctccacctcagcaagcccactattgtaacaagaatttcaggaacctcttccccggtgccccctgagctagtggacaccgacagacgggcgttgctggagcccatcgtcccgactactccatagccaaggtccggcgtctccgccgtggacgccaggacggtctggaatctcccaactcggtcctattctgtgagtaagcccaagccagccgtctccaagccagacatgtcggtgaagcccgtttcgtgtcaatatatttggacttcaccgcttcggcaagattccaactcggtaggttgtacggagtatgtatgttgtatgaagaatctattgaacaagcctgtccccacgggtctcgacttcaaccgacttaacggtgtgagggtcattattgatcgcgtaaatcgggaaactggattttggcttgaaattcaagtctccattgtgcgcgctatcgccgatttactttcgctaaataatggaccccaacatcccagcgttgagacaaagccccgagtcgctctccacccaacgcgtgctttgtgttgtacgtcgtaaagctctttaccagacaacgggccgtcggtgggtttcagagtacggacgtattacacaataatagaaaatgcgcctgcctactcggtccaggaagtccatttccgaattctacgttcgcaccgaccatcccgacacgagtctggacttcgggcgcccgcgtcttgtaaccgcatccagcgacacgggtaaacagaagcttttcgtgtagcgtgtagcatgtggatattgagaaacctgaaatataaaattcagagccctctactccgtaggtatggagtatgtacggagtcctatccggcctatgttgtgctttgtctagttgtacattactgtactccatactcctactccgttcatgtcgatgatctacagctgcatgacaggcctgttcatccaacttgttttgaaccatggaaacatgatcaatcgcagatgcgatcgcccaatccctggatcgtgacggaaggggacgtccggggaagacctcccggtccatggttcactcccggagcttgattctcttcgtatcagacggacgagtcacaattccatttctgcacaacctgcgagacagactgaagcccggccgatttcagtgtctgcacatacatataacgtgccgtgcatagaaacgcaagtgccctcctcgaccccttgtcgcgttggcaaattagctgtgttgattggacgattcctccgatgcaggggatacaccacatatgcgagcaccgattcatcacattcgcgagatcgttcaatatcatccatgcatttttactgtgtaatattgctgatctctaacatacttatccaacggagatggtcccctcctccccccgcgcggagatgcgccgtcggaattttctcgaaaaaggtggacacggggctagggagactaaattaggaaattgacggagaacggagggcccggagagcgctcttcgtttggagtgtcgcggcttgattgctcgaaccccgctaaggtttaaacgtgcgacgcgcccgtcttcgagaacataggaatcaccgatgaatagactttcatagtgtagacttgggggggctactccatccgataacaaaggcaggcgggaatgggaagtaggtggggaactggccgtcgtgtcgcatcgaggtgggaagaagaagaaaaaagaatgaaaaggggggagttaatgatcatcggagacccaggactccgggtaaacaagagggtgggatcgtgtcgctattgggtgtgcgctgcaccgagcggcaggattgggtctcggcaggtgagaatctctccggctggggcggcttgtgagtggtgatgatgtcgtctgggttcctgcgactggctggctgcaaggaacaaggaacgagcgtcgtggcaattttttaatttgaagcccgtttgagttgctatcgggcttgccctggaggagtactccgtatacagcttactccgaaggtctaggcgcctcttggtttattggatttcttagtctcattctcacttactttctataacatactccgtactccatccgtagtcagataaatcgtactttgaagaatcaggggatttactaggtactcggaacttggaattcaacaggaataggatattgagatacggagtagtggtaacctttatgcacttgcacacttaagatatggtttcagctcattctcctaatggggaaggtgatagagagctattctggtaaaagtataccaagtaaaacgtatgctagttatgtggaactttacgtgagtccgattgtgctgtttcttggtgtctcatgtctgtttattctgtagttctgaggttgattttaatagggctcaaaatatgtgatgttattggctagaaatatgtcaatatatatctataactaaggtcgaatatcttcaacctattttcttgtcaacacatagatcattctatccattgtcccataataccttcgattgcaccatacactcgtcgggaaacgaaagtaatgtagaggttggtcccaagtcgagaccctgatagatgttggtaaatcctataaacctaatcagaaactgtcccctgaattggcgctccgcttcatccgatattaatagctcccagatactggagtccatgacgaggagatgtatgcatatgctcacatcggcacaaaatactttcttcagatgcaggttgatatgcccaaggaacagcttgcttacaatgttcctctagagcttgctcaagaggcagcttccagctacattgcatgaactttctcgcctcgacagaagcggaccgagctctacagcgtgttgtaatgatacgatgctactacatcattgaatcctgatttgctttgaatatgccgaacatggcattaatcctccatgcatgagacgccgaaccttgtccgcagagcattacgcgtcgccgatgagcacacaaccctctcaatgctactcaaccccacgagaagaaacggtccgttgagtggataagtttccaaaccctcgggtccattgtgcatggccttgaattgagaaccaacggtcttacactacgtaacctatcagggtcgaagcttactttgaaaggttctcgatacgcagggagtttcatgcaaaaataacaatcgcccaggtggagattcacggaatactccgtaccatggttgaagtatttggattggctgttcagatcatgccatatgctgtcagtacgcctcatccgagaagccaaaggattgtgatcgcatatgtacaacatacggagtactctgtacgaggtatagcattccataaagtccatatgcgttgggaaacatcgtacataacaaagttttacctctaaggagttagtcttgaaagctggggttaggaacgaggctgcatgccatgcagtaatatatcaccgaccctcttgtctatccacacttacatcaaccacgggacttcattgccctgttttggccattacgtgtatatcatgtgtactccgtacaacatatgtacctacattgttgtatgctgttaggtatggtaccggggacgagcgccaggatatccgattgtggaaagtgggaacttggaaaacccactttagagtagctcgaaattaaatatattaaaaaccgccttctagaaccattttagcgcctattgattagagaataatagacatcttttccggttgtctgaaagagttccatggatgctataatagaaacaacatggaagataacaaaagtgtctttcgtcactctggggctgggcatctggtctcgttggatatcgagcatatggaccctatcgttcattcttactgagacaaggttgtcgggtttgcgcatatcggctccccgaggtacataatgcagtagtttttggatccccttactggttcaagctaggatatccttgatcatttattgaatggagatagtaggaattcagttacggagtacatataatgtgtcaaatctaggaaacttgcagctcggagatcccatgtcgttcttcattgcaaattgatagatgtctccatgtgcctaaccaccaattaccataattgaatttgtcttttgtgggccttagaccagtcttccacggagtattttctaatattcttgcctctgccatcaaatttgaggctatccgtggaactacttggtaaatatacaaatgtacctaagcaggatgacagcttgaacccgtatgggcaaaatgtgaccctatcagcatgcctaggtacacccggctgttataagcgtgcatatttcgtcacacgcagacacacagacagtggggaacgtcatgctgtgaacgaaagacgcagaaccaagtatgtaataataaattagtctggggctctagatgtctccaggaccaacacacggacagttgcccccattagtccaaggggcccagacttggacttcctaaaagctatgtcaaatgcaatttagagtcacatcatgtcaaatgggatgtggtacctgtaagactgtagatatgcaagtctataattgacagtatctcatcttggtgtcattggacgtcgtgttcatgcaacgatagaaacattgaatatttcatgaggatgtatagtattgtaatcacatggtatctttccgctggatccccctcaaaacagcctttccatgggctccatcgtgtattaataccggtattgcatgcgcccgtcccgcctccacctggtgcaacttcccctaattcaatcccacttccatttccccattgcctttgttataactcgttgatggcataatccgctgtgctggattcttgttctttgactacgcaaggtcttttttcagtctgggtaaaaagtgactctgcttccctcgcctcaacgtcgaatatagtcatgagcggatattgagctcaaaccacccccccccctcaacccctccagaagctctctggactgtggccctgtgagtcaccgatgtttgggattcgcgcggcagatttagctgtcgacactactgcgctggccaaatccggatctgttgcgaccgcattcgagtacaccgacgaacaagtgaccacgcccacagccctatcccgctatcgcggtcggggaaacagtgtatcacgagatttcaaccacatcaaccattccccgagcaaaatggcctctggatatgcggtcagcccggagccccccgcgctcttcgtacgggccatgtacgactatgatgccgacgatcacactagcctgagtttccgccgtggcgacattattcaggtcctcaaccagctagaaaccggatggtgggatggggtaatcgatgatgttcgaggctggttcccaagtaactattgtaccccactcacggaagcggacgatttcaccaaccagttcgcacacacccaccttgaaaccgagctcggcgcggactctggactcgaagatgaatatggcgatggacatgatgaggatgaagtgcactccgatgacaacgctcgagacccacagccgattcttcctatggagggagtcgcagcgcccaaggagcaggaagaggccgcattctggatcccccaggcgacaccggacggccgtcttttctacttcaataccctcaccggatattccactatggagctccctttcgaaaacccgaccgcaacaatcgaacccggcccacgagatcgaaataatttctatgtccccgaccagacacggccacccccggagatgatggcccgtggttttgagcgagatgaagacgagtacgatggctctgcatcggaggccgaaggagaatcattgatgttaggctcgcatggctcgatttctcgccgacgccagtccgtgatggacgggatatcccccgccacgtctatggattcgttgtacgccccaggatctaaagatttcaaaatgccgcacccgccgaacaagcgcccgcaaaaatcatacagcctgggcggaaacagtaccagtacatctatgaccgaaagctattcgagaccttctatttcctaccctcctcagcattttgtcgacgatggcttcgcaccaccaataacctggcctttgcttgtggataatatgcgccacgccgtggaatcttatcgccaaacgcttttcaaaggtgagcgtgcagagtatgtaagaaaggccgaggacatatccgaccatcttcgcatgctgcttgctgctggatctgacaccacggataaccactctggcaacccatctatcatttccacaaacaaggccctatatccttatttccgggatatgatgtccaaattctcgaagctggttctttcatcacacattgctgccgctgattggcctggtgccgactcggccaataaatgcttgcaggaggccgacggagttatgcagggtgtgtatggctacgtggaagtggcacaacaacagcgcggagatgtgattcatcgcattgtgcctggcttcgtcagtggtagctcttccggtggtagctggcagaacaatggtgtttctttgcatacttcaggtccaacatcattccttgtcccggatggagactcgcgatcagagccttcggtctctcttgacactgcgtttttggattcaatcgacatactcaggagatcttttgttggtagcatccggcggctagaagagcggctggttgtaaaccggaagatcgtcacagcgcaggaacatgcagatattgcggatgcaatctccgctgctgcaatcaaggtcattgaacagtttcgcccatggatctcttctgtcgagtcgatgaatttagctccgttggggaccagcttccagaacccccagctagtagactttagcttgcaaaagcagagagcctacgatgctattggagatttcgtcctgagctgtcaagcagtttccgcccctctggccgatgagtgggccgagcttcgtggtaattctctcgacgatcgtgtgaatgccgtgcgaggcatcgccaggcagttggagaactatgtctcccagattggtttctcgctgtcgctgctccttgagcaaattcccaccgagccagtatcatctctacgacgtggtagccgccaggaatcggatgatgagtcgttcaagaagatgcatagccgaggcgagtccatggccaagattgcagagtcaatcggaattccatcctcctacgcccctgaaaaagaaggtggcaccgataaagtacgaagaaatatggacaaggcccaacgattctttggccaggcacccccaacagctatcacgcgagagccaatccgtgagccagtccgcgagccagaagagactccctggttcttgaaaatggcccatgaaggcgaagtgttctacgataacaagggagacctgccaatcctcaaatgtggaacactcgcgggattggttgaacacctcacccgccacgataagcttgatgcatccttcaacaacaccttcctcctcacctatcgctctttcacgactgccaccgaactatttgaattgcttgtccagcgatttaacgttcagcctccatttggcttaaatcaagatgacatgcaaatgtggattgatcggaaacagaagccgattagattccgtgtcgtcaacattcttaagagttggttcgatcacttctggatggagcctaatgatgaactgcacatggacctcctgcggcgtgtccatacttttaccagcgactcaatcgctactacaaaaacgccaggaacccctacattattggccgtgatcgaacaacgacttcgaggacaagacacaaccgtcaagcgccttgttccaactcagagcaccgccgcaccaacaccaattatccctaagaatatgaagaagttgaagttcctcgacattgatccgacggagtttgctcggcagttgaccatcattgagtcgcgcctctactccaaaatccggcccactgagtgtttgaacaagacatggcagaagaaggttggccccgatgagccagaaccatctcccaatgtcaaggccttgattcttcactcgaaccagcttactaactgggtcgctgaaatgattctcgctcaaggcgatgtcaagaagcgtgtggtggtcatcaaacactttgtgaacgtggctgatgtatgtattttctatatctatttgatcttgaccttactaactcgactatacagaaatgtcgcaacctgaacaattattctaccctgacatccatcatttcggctcttggaactgcacccattcatcgtctaggtaggacatggggccaggttagcggacgcacgtccgctgttttggaacagatgcgtcggcttatggctagtacgaagaactttggcgaatatcgagaaaccctacatctcgctaacccgccctgtattccattcttcggtatgcatcacaaccatttcaagcagaatgtcttggagcatctcacccctttgatttgactaacacatcgtaggtgtctatcttacagatttgaccttcattgaagacggtattccgtctctaacaccatcagaattgatcaacttcaataagcgggcaaagactgcagaagtcattcgggatatccagcaataccagaatgtgccttatcttttgcaacccgtcggcgaacttcaagattacattctcagtaacctccaaggtgctggcgatgtacacgacatgtacgaacgaagtctggaaatcgagcctagggagcgcgaggatgaaaagattgcaaggtatgctgaagcctcaagcagagacaagagctccttgttgtttgcatccaccgttgctgttttgcgataatcttgtttttttctttttcttaaaaactggcgtttggcatttgcccggcgatacccaaatttgacctattctcttttttttgggggccaagacaacgacaactctgctttcttttttttctttctctcaaaactgttcggctgttgagactaaccgttttggattctgaatctcgtagattactatctgagtccggcttcctgtaacccgtgaagatccctgtcgagttacatcccgcggcgccaccaaacaggttcgacaaatgcgccattcgcgctccaatcgacgttcgtgtttcaccacctcgtgaccgttcaggctatcctagtctccacaccacctcaccttttcacctctcagatctcacttttcagggatacttgcaggttgatctatcgcatgcatgtgaatgtctcaaagacccacacatgtgaacacttattctcgatgcagttacattcggtctcggcatttatcattgcaccggcgaatacggagtgctccgtatattgattctcgatatagcgcaatagagctgtttgattggttcggatttcttgtttattccccccttgtttccttctttcgtctcttatctccccgatgaggtcacctgcctctgtggccatctcgaactcacctcttctttgtaccgactgtgacatatcctggccattttctcggcgtattttgccttggatttcagtttcatttttttgtttcctttttcaacatatccccttgtgttgtcgccaggttagggcgacctgcttttttcttttcaggcctttttcctctacgctgtattctgaataatgaacgtcacgaatgactcgagacttttgttcctgtctgatcgatgttacccggtggagttgacttggtacttttaacttcattacatacagtgttctactacttgttcgattcccgcccggaatattgcgtattctgcgccaatagagattgattaccttggattgtcttagattcttaggctagcggatttactaccgtggacaccaccctcagacagggccagtatttgcctttgttgcccttgcttgagacggctacaaaaggtgagacatgaagtcgtaaattcattcatttgcaggaactgcaattttagatattctatgatcatggatcgagaaagatcgccgcacatagcaagccccgagaaattccagcgaatatggtgatatcaacccgctgagctccaaatacaacagttcaagctaagtaaaaagcgtggcagtcatgtcaatattttgggatcgtggacccctcatcatatgagctggatcactctgtcgaaggagtttggtttccgatgccgtgaaacagtttcatctttgtttcggatgctatgagacccttcacttcctccgcaacaacccgctgtccgccgcggacaaccttatccagctgttgatctttgctgttgacgccacccgccctcccgcccgggggcccccnnnnnnnnnnnnnnnnnnnnnnnnnnnnnnnnnnnnnnnnnnnnnnnnnnnnnnnnnnnnnnnnnnnnnnnnnnnnnnnnnnnnnnnnnnnnnnnnnnnnnnnnnnnnnnnnnnnnnnnnnnnnnnnnnnnnnnnnnnnnnnnnnnnnnnnnnnnnnnnnnnnnnnnnnnnnnnnnnnnnnnnnnnnnnnnnnnnnnnnnnnnnnnnnnnnnnnnnnnnnnnnnnnnnnnnnnnnnnnnnnnnnnnnnnnnnnnnnnnnnnnnnnnnnnnnnnnnnnnnnnnnnnnnnnnnnnnnnnnnnnnnnnnnnnnnnnnnnnnnnnnnnnnnnnnnnnnnnnnnnnnnnnnnnnnnnnnnnnnnnnnnnnnnnnnnnnnnnnncccccgcctcggggggggggtggcctccattccacgtgcggctttgcgcactttttgactgagatccatgatctgcttgttaccgaaatcacgagaggtgaatagcgggctctggctgagagtcgcgacccagtacttgttccatagaagggacaatatttccgtatcaagggtgcttttgaaatgactgacatcaagagagtagtattgattggcatgcgcaccgaagtcttctgccttcccgagcggaatagtctgatactcgtcatcctcatgagcctccttctgcggggtaaagttcgatggaaatgtgcggaaagcgccgatctcaacgcgacccgcggagatggtacggtccgggtcgatgacaacggcgacaaacggtccagtcatttgctgtgtttgttgagtggccacatcaatcccagacagccagcacccataacccggatgactgtgataccatccgacagcattctccatccgccccgagtctcgacacgactggagatatgataccatgtactcgtttgcctcgtcctgcgcattcactcgggtttcggtgccttcgactggcagccggaacgcatctgtcaccacgaaggtgttcggtaagatgtagccttgcatcagacccataatctctagtgagccacccgagcgggcatgcatcaccatcttcaatagtgccgaagcggagattcgcacgtgcttgaaatagtatgggtcggtggcccatggtcgctcctcgttgagggctttttctgtatcggcattgtattcgtagagggcatctcgttgaggatcaaacacgcttatcgcattttccagctctgtgcggggacattagttaattacaagctggctcatatcagtatggaggtactcaccccaggcctgctgggcagcctgcattttgggtggatgggatagagaagacagtcgaatggtaagcaatgtatcgcaaggatcagagtactttaaggcaaggactcgggtgataatgtgagttctgcaaggaccggagaataaatagtatcagggctgaatgcatgaagtagagaaggccgtggggttgttcattgattggcagtatcgggcggtggggcttgctgagtcagctgttgcccttgacgacggtctcacccaaaacaccacccacttacgccttacgaaacttgatgttatctatcatctgcgatctccgaacgcccccccccctctcataaacaacagtgttgttcgctttcctatgtggctgccctaagtgctttcgcaaacctccactttcgtttatttccgtcgcaccttgtgtgctgagaaccctgtgtgtcaggctctcctgttttgatcccgacattcatcaccctgtcgcagcttcgctcggcattgtatcgttcatacaatattttgttatcaacctcgacttttgtcatctccgttaagggactttcattacaatggcggtagataccagctacctgaccactcaggtcaacaacatcgtcgcccagctccatggtatttacgacgaaattggagttcctgcgcgggagcgcgagtctcgtgaagcagaggtaagcttgctctctgatataacaatggcattgtcgcgtggctaacagagtgatacagctcttcagcgccctgtcagagaccttgaacaatcatctgaaggttgttgatgagtgagtcgcatccatagacagacccattggaggcttgctaattatatttctagggagagagaagatatgacgcaagaagcggaacgtctcattacagctattcaacaaatggaatcgtccctgagcgatgaacgggccaatggccaatacgagcttaaccgcgacgaccttcgtgtcacttacccacttaacaaatgtattgcattcttacgcgagaagaacgactcgatgagcaagctgcatcgggaacgctttgagcaggttaagagtgagtcttatctgtgtggtgtgtcgctgatgctcctttactgacattcaatagaacttgtggacgcgcttgaatcatactcctctcacctcgagccatcatttgttaagctggaacttcctcctactgcaccagggtcctcgattcccccaagcttcgacctttctcctatgtatgtgaccgcattggatgccgaattcactcatgtctacgaagagtaccaccgccgcattgccaaagtccaatctgcctgtgaagaaatgatcaagctctgggccgagctcggaacgccccaggcgcaaacagattccactatcgtgaagtgttatcgcgattcccctgagcaactggggctacatgaagatgatgtcgccaacctaatttcgaagcgcaataaattggtggaagaaaagaaaagccgcgagcgcaagatcaacgacctcagagctaccgtaatctctctttgggatcgctttggtgtggaggaggcggatcgcaaggcattcctggctgcgaaccgtggctgcggtttgcgcataatcaacgacctcgaagaggagttgacacgcctcaacgaacttaagagacagaatctccacctctttgtggaggatgctcggtgccgattgcaggaattatgggacactcttttcttctccgaagaggaaatgctcgatttcacacctgcattctccgatgtgtgcagcgatgctttgcttgaggctcacgaggccgagattacacgactggaagctcttaaggaacagcgcgctcctactctcgaaatgattgacagacaccgcactcttttgacagatcgcgaggcacttgaaacatcaagccaagatgcatcccgcctcatgggccgcgggaacaagggagagaagcgtgatcctggaaagctcttgagggaggagaagatgcgcaagagaatcgccaaagaattgccaaaacttgaagctgacctacggaaggagttggaatattgggaagacgaattcggccgacccttcctagtgcacggagagcgatatcttgatttgttgacacctgtaaagtcaatgcttccaccacgctcaaagacaccatctgcaacaccctcagctaccaaagcaagcacaatgagacaaaacccacccgcccgccctgcaagctccatgagaggcctgcctcccccccgctcagccaccaagactcccactagcagcggcccagttaaacacaacaccattggctacggtgcctctagagccggtgccacctcaagagccggtgcaacatctccttcgaagcttcccgcccgtgtcccgctgggaaacatgccccttggaaccaactcccctgagcgtcgtatgcagcccggtgcctactcgtctggtacacttaatggaaagatgcagccccctcgcggacctcccccacggatgcgtgcgttgacgattgagtcaagggaagaccgattcagccaccttatggagccaccgcgctgcaatagcgccatgtctagtgcctatgtgcggcctgttagcccggaagacgtttatgatgaccggcagcgatctttcatgagcacttcgggattctccaactctcaaagatctactggattctcccattcatctcactcttcacactcgtcactgtctttgaactctagccaagtgttcccacgacctaacccttacctacaccacgcagctccaccgccagctgcccgccaagtctccaactcctctacagtcaacacaacaacctctggatctgaaaattgggagactttcgaggacggctcgggatcagaagccgatcccagtgacatttactattccaaactccgtgccgcaaacggagggaaacgatttgcacccgaggatggatcggatctcactggcaaaaagaccaagggtattcgcagtgtcagtccagaaggtccgcatcccgggcaggtcctgcgcgttgctggcagtgacaccgagtgggctgatgactacgaaacttattaggtgttctgccattgcttccctctccataatgcatcccacctcttgcacctcatttctcggcgccttggaagttcaacggtgttacgcaaccgttgacctttgatgatcccacgactgaattttgcatttgcacggttcatgataatccttggtttccctttcatgactgagcacccttagattccttatgggcaggtttctcctctctctacacacgctaattcccgaggggccgacattcaacttcttttcctgtccataattacgagtttatcatgtcaatcttgctcccgctctccttcatctcgatgatattgagcccaaccctgcgcctgactgtgtcaggctgcagccctctgaggattcctgtcattcacgcctttcccgactgacaccctcgctgtttcaattgccactgagtttaatcttttgctttttctggtcttcttggcatggtgttatctttaattcctttctctgtcacttattgttttcgttggcttggtgcttaaggctcgtttattcccttttcgatctccggttttgggagtcggattttgtccttggttttcaccgtttttctatgtatttgtcagcgaagtacgccgtacagtgttttgatatatctagtgttgttaattttatcttctggttgttcaaccttttgttcaattcgataaatagcatggatagatcggtgcataagccgagacacttgacttaattagggctacccatccacatgactccggtaactaggacgacttggattgcagcccgaacaacaaggcaagagataatatcgccgctcacaacggactccgtacggagtgagcggtgttagcggtattcgtcattaggccaccgtcaaacaagcccctggtcctttgggctcagtttcatccctcaaattcaaattcaccagaagttgttccaccacagtagctgtcatggcaccgactgtggttggtgacacatgtgacagcctttttgggcctgtgatcagtcaacatgattgtcgtggagggttcgactttacaggtacatatctccaatgtctgggcgcctgggcagtctccacatatactgacatggaagcaagttctattcgaagcatggatattcaacattaccccagcagtctgttttctcctgctgttacccattcgcctgttccagctatctagagagtctttgaaagtaaaatcctcgttgtctcattgggcgacgctggtaagtcttgctatcacttgtcggaccttgaaacgtctaaataatgctctatacaggctattgcggtagtattgtccggaattcatgtcgttctgcttgtgtttagtgcgacgcagcactaccccgcacaaaatgtgtcagttgcgggtgctaccctcagccttatagcggcaatttctattgttgttctgcttcatttagagcacagccgggctgttcgaccctccttccttgtctctgcgtatctgcttattacggtgcttctagacattgcgcgagtacgcaccgcctggctgttgccatatggtagagcatacccgacctgcctcaccgcatctctggccaccaaattgctcctcctggtgctggcaaatatcgaaaaacgcaaatggctgttgctatccgaacagtctaccgagagaactagcggtatctttaacaggggtttattcgcctggctcaatgaattactgagaaaaggacacacctcgttgctcaccagcgatacgctacctaacatccatgagaagctatcgtctagtgatttagccgaccgattttcgaaatcatgggcgctgtgcgaccagagtcgtcagcatgcgttgctgctggccgtcgttaactgccttcgctgggatattgctgctattgctcttcctcgactcgccttgataggatttagcatagcgcagccattcctggttggcaagaccgttacattcctcgagcaaactgaatcctcgatgaatattggctatgggttgataggagccaccgcgattgtctttatcgggattgctgtaagccttatgtcttcaaccacttatcccactatccgatggtcattggccgactgagtttatgacttaggtcactacggcatcttatgagcacctaggatttcgtgctacgaccatggtgcgtggtggccttatggctcttgtctatcagcacatgatggagctgccactggggagcaccgatgagtctagtgccatgtcccttatgggagctgacgttgaaatgcttgcggagtactttcactctacagtgtgcgaatcttgggctagtatcctacagctgggactggccgcgtggatccttcaaactcagatcggtgttgtttgtatcacacccattctaattgcaacaggtactttctctttctctacctatttgcacgagatgtgatgaccataagaaattaacagattgactagcttttaccgttgcttcttttgccacgggcaatgctgtgtccgttcggcagaagacatggctacaagccaccgagaaacgcattaatttcaccagccacgtcctcggctcaataaaaaacgtgaaattcttaggactaacagagatcataaagaaatccattgaaggcttaaggactgaggagcttgagatctccaagaagttccgccgaatccaaaccgtccgtgtctgcatgagtacgtatacttggaagtccatctacggatagttttattgaaaatatcaggatcaactgaccagtctattcagtaaatcttccggtgattattgcgcagtttgccactttcgcgacctatgctgtagttgcgaaggtgcaagggtcggagggtctttcggtctcacaagctaccacggccctttcactaataaatctgctaatcactcctctcatgcatctattgttggcagttccagatgcattcgcatcaatgggatgtctgtatcgagtccaggacttcttgaaacgtccaaatattgtcggtgagtagcgctaatactcccatacgtgctactcagtaagacgtacagcgaattaacctcatttacgcacagaaagaaggaaattgctccagtcagaagcagaagctctgaatttacctactaattcattcgaattcgaactttctaactatcccggggctaggggaatttcctcgccagagaatccatctgacgtgctgatctccctgcaaaatgcctggtttggctggaatgacccttcttcggatagtgctggtatcacactcaatctgagcccctcgcagctgggtaccctagttgcaattgtcggtcctgtgggaagcggaaagtccacgtttctcaaaggcctcgcaaatgagacgtccattctcaatggtgacgccttcatcaagtacccagatctagctttttgtgagcaaactccatggctaaccaatacgacgatccgggaaaacatcattggggagaatggatccgctgcatttgattctgattggtattcgaccgtggtgaacgcatgtgcgctagattccgaccttaaaaaaatgccagcgggcgatgagtcgttcgtcggtagcaaaggatctaagcttagcggagggcaaaagcaaagaatcgtgagtacaaaccatctttccctctatatgggcggtccggcccggggataatagcaatggatttgtgaactgattttattataggccatagcacgagctgtctatgctcgcaagcgcatcgcgtgcttcgatgatactctgagtgctcttgataattcaaccgctcggctggtatttaacaatgtctttggcccgtccggactgctgcgtcgactgggctgtactgtatttctcgcgactcacaatggtgcgctcctcaaccctcgatatctttatcttgtcacttgtgtggtatatactgactattagcagttcaatatctaccccaggccgactttatagtcgtactcggagagaacggcaatatttcggaacagggcaccttctctcagcttctcagtcacgccgggggatatattaaccggctaggtattcaaccagaacagattgagaaagaaaagatgcaagatgacattccaactgggcttccagagactagtgaagtcataacaagccgcctatccaccccggcctctatcgatgaatgccgacagacgactgatattgctgtttacaagtactatttatctgctatgggctggttccgagtctttgtgctgagtttcttactggtggtgaatggtggtattggtggattacgaagtatgccaaaattctcgactaataacaatgctgtatgatgcttatctttgcataggtgcttggattgagatctggtcctctagcaccgacagcgcttcaagctcgggattaggctactggcttggagtatatggggcattgtccttcgtcgaagccacttcaatggttcttgcggtatagtaagtgaaaaaaaaaaaaattcggttaaagcttccatgctgattgggttctatctaagttggacctgggtcgtcattgtaccggccgcgtcgaaaaatgttcatgctactgtgctgcaaacttgcatgaggtgaaattccagttcttcactaatctaaatatcggccaactaacatattcagtgcccccttgtccttcctatctcacgtagacacgggctctctcatcacccgttttagccaagatatgaggctagtggacatgatcctcccccgaggttttatcacgacaggattccgtaagtgcattcattatacatttatttaacgtgtttctctaacccgagagatatgaagaactctttacggtgctttcacaggccgcaatcgccctagctgcattgccatatctggctgtagcccttcccttcctagttgggatgttagtgctagtccagcgcttttacctgcgtacatctcgccagcttcgactgctagagtatgtttatctgtgccaacaacgctttaatttgatcagcatgcttgtgccttttagcaaactgacaaacccttaggatcgagctcaaaagccccctgtatacccatttcattgaatctctcgctggtgtagttaccatccgtgccttttcatggactactgcttctacgtccaaaatgttgtacttacttgatagggcgcaaaggcccttctatcttctactgtgtattcagcaatggctgggcctggtactgaagctcatggtgactggtatgacgcttattctcctcggagctgctatagctctgcgcggacaagtgagccccggtttgttaggtattgcgctgattggaatgatggacctgggggaagtactctcatacttgatccagaactggacgcttctggaaacctctttgggtgcgattgccaggattaaggatttctcggaagatactccaagtgaggaacaagatgcagtctatgagcagccaccagacgcaaaatggccaagtcggggtggcatctcattcgttggcgcagatattgcatatgagtctgagaacgcagagcccgtgttgcacggtatctgtctggatattcgtgctggggaaaaagttggactgtgtggtaggaccggaaggtgaggaaagacacttcagtaggggggagaataggctgactctcttatagtggcaagagcactctggctctatcattactccgtcttaacgaggtggtttctggccaggttcttatcgatggggtagacatatcgacggtgcctcggtcattgattcggcaccggatcagctctcttagccaagaagccttccttttcccaggtactattcggcagaacgtcgatcctttaggcattgccagcgatatcgatattattgaagctctcaaatgcgtcgaaatctggaatgctcttatgtctgcgacgaacagcgacgcccacagcggagggttgctagatgtaatactgactgacacgactttgtccgaaggccaaaaacagctattttgcctggctagggcgcttctcaagaagagtaatattttcatactagacgaaccgacaagcaggtatgtaatttctgtctttttgcttctggcaacacatgattatgcgagcaatgccaaccattcacaatcaagtctggatgcagagacagatgccagggttcagaaagtcattcgccaggagtttcagagctgcactatcattatggttgcgcatagagttcataccatgctcgactttgaccgagttgttgttctggatagtggtcgaatcatagaagagggacatccttcggacttgttgaacaaggaaggcgctttctcaagtctgcatcatctgaagcagtcaacaggaagcaatcaggagctctgattgatgggtctcatcaagttgttcacaaagacttacagcttttagaccgcaatacactttgtttttccgctctatatcagtagacaaatcatagctctggggatcagggcatctgctctttatagagttatttaccgcaacggacaacctgctaagcaagtgattgaaggcatcaatgtcttgtcttcagcaaaaatattggaattgggtcatatcggatacagctatagtacagtcactcaacctcttaattctacattaccggctagtcgcaagagtccccatccaactctgatcttcaggcaaagttcccttaggaactctctggccagcagaaggaacaagggactgtgtcaacgccttggcgtcctgcactcggcgaagtgtctcatctctcccaagaactaccatagtctctgagattccaggcccaggcgcagaagccaacagcgcccagcggaggtagtgatacagctccttcttgaatatcttccctgcgttcttcgagccaacgggtgtctctggctcagacgtggggaaaacaacgctttccgcgccttcatagctgttaatgttgtcgcggtgagtgtcgatattccaggccgcggatgggacaagggttaaggcggctgctgcagtgtgcagcgcttggattgggacttctggggaggattggggtgaggccggtttgtaaggagctctgtccagtttgggggtaaagaagttagagttacgctgggcgaactcctttgcgtttgtgtagttgttgacatctgcgcggatgaggggcgcgatgtattcggagagagtgcgaccgttgaggatcgtggtgctgctaggtgtcagctattaggtactatgtaatacacgcgtgaattctttacggctggtggctgacttacagtttgtcgagagggtagctttcttccacgaccaagctcaccttcttcaccatctcgtcgaactcaggtccgccgcttttgaccaagcgttggacatgtgccttctggaggaactggagtttttcaaaggagacaaccgtatttcctcgagtaattttcaaattgaactggtatcaatattagcagggaggttggcgtgttttcgggggactaagaagaacatacaatctgttccagttccttcagacttaacacatcagacttctcggaatgcgaccagcctagaagtgaagtgaagttcaccaaggtggatgggaggatcccttgcttgtccttgaatgacgagaggtcgatatctgcgttgcgcttgctgagcttttgcccacttttgtcgacgagcaaagggacatgagcaaagcttggtggcgtccatttgaaggcattatatagcgccatgtgcataggtgtcgatgacatccattcctgatagacgttagttcagtatcttgtgacttgatagctacagatataataagtaaactcaccgtccctcggataacatgggtgatcttcatgcaatgatcatccacaacatttgccaagtgatacgtggggtgtccatccgatttgataaggactgggtcattgtaaacacggtcgatgaaatccagcttcgagttgttctggtgattctggccggatttgccataaaccagatcattgaacatggggtattcctctacttttagtcgaataatgtgtgcctctcccttggctgctcgatcttctgattcttcggcagatacgtcgccgcatttccggtcatagccaggcggcagtcctgcctcgctgcggtgacgggcgatcgaatccaatcgttctgcggagcagaagcatcggtatgcatggccattggcaacaagatcattggcatgggactgatacaaagcggttcgttcggactgcatgggagcaaatattagagattaatttcttgcgacaaaggagtgatgcctcacttgtctataaggtccatagggtccaccaacgatgggacctgtcaacgaaacgagagtcagcaatttccctccatttttagataagtttcaaactgaccttcatcccagttcaatccggcccattggagatcatcatagagtcgctgttccgccccgggaattgtccgtttctaccgtaatcagtcgtagtccacgcaacggagcgcaatccacgaacctggtccgtatcctcaatgcgcaacagaaattgaccaccggtccgcttggccagtaaatagttgaagagagctgtccgtagggagcctagatggaggtatccggtgggcgagggcgcaaaccgcgtgcgcgcagggccattcggcagtttgttcttcaagttaggtgcttgagcagccggagaagaggagaaggctctacattggatgatccaagatcgcctggcgagtagcccttggggacatctcattgcgaaatagaggaatggccgatctttctgatatgttgtggagttgcggagttgcggcgcggagctcccgaacaaaatttctcaacttctttggatcaacaactcccgctctcacttctcgttcaccaacctctctcttttactattgggctcaagtcaacggtctttttctattgaagaaaattccgatcgtgttttctacaaaataatcactgaaaagtacgttggaaagttgtgtgtcacttgagactctactaacaatgttctcagtggctgcggttgaagttgacctctacggtgtgtgctcatttgcgcagatcaaccatacaggaataccatattaatcagttattcattcatacagaggtcctagagatccatgaaagctcaactaaagatgatatccgcaaggcataccgcaaggcaagacgaacccgatcgtctccggattccagcgatactgacagccggctttccaataggcagctttggccaaccaccccgacaaggtccccgaatccgagcgcgaggaagcttcaatccggtttaaggctgtgcaagaggcctatgatattctttacgacgatgacaagcgacacctctacaacacacacggcatgtctgccttcaacggctcgggtgagccgggaatggcaggacaacctgacctagatgacttgctggcacagatgttcggcggcggcatgggcggtatgggtggtatgggcgggatgcctggcatgggaggaatgggaggaatgcctggtggtcgccccaacaaaccgcgcaagagccccagcgaagaacaagattacgaagtcagcctggaggatttgtacaagggcaagacagtaaggttttccagcgtcaagaacgtcatttgcggacattgcaagggcaagggtggcaaggaaaaggccactgccaaaaagtgctcgacttgcggtggccagggctacaaggaggtcttgcagcgcatgggccagttcgtgacccagcagacggttatctgtaccacatgtaacggagagggctcatatttcgccccgaaggataagtgtaagaagtgcaagggcacgaaaacaaccgaggcgaagaagatcttggagatctacatcccccgaggcgctaggtaagatggcctttttttctatctaacggaatcacatgcttactgtgctctaggcaaggagaccggattgttttggaaggcgaggccgaccaagtgcccgatcaagagcccggcgacattgttttcaaagtcgtcgaggaagaacaccccgtgtttacacgagccggttcagatctgcgtgcaactattgaaatcactcttgctgaatccttgaccgggttctcccgcgtcgtgatcaagcacctcgatggccgtggcattgagctcactcaccccctcaccgccggcgctatcctctcacccggacaggtcctcaaggttcccggagagggaatgccgatgaagcgtgtcgattcccgtggtgacctgtacttggttgttgatgtcaagttccccgataacgggtggaagcccaccccagagatgctggagaagctcaaggagattctccccaaacccagcgctcctatcaaggccgacaccgtggacgaagttgaatacgaccccaagggtcagatcgaggacttcggtgcgcaggatggccaggacgcagcaggatgggaagacgaggaagacgacgatgaaccggcgcagtgcgcaactcagtagaattcttgcatagatggcgtctgggggtttgaattaatggggacttgtgaatagaacaaccctcttggcttaaaaacaaaaatacattgtataccaatgtaatcgtctttgcagccccacccgcgttcacgggctgcgtctattttcattattatacatagttcgaaggttagttaagagataccaggttattgaaatatcatcaccaggtaccttttgtatgcgtgtaccatataaaagatacctaatgtgtgtacctataataatgaaacagccgggtgaggatggaagacgattacatcgacgtacaatatagggaatacggaaccagttccgctcattttatgagtggacaggtggatggaccttgtacatattattcagatctatttatgtactcgtcggttttgttttgtttttttttacaaatgagatattcaacttatcccgaggccacggaaagaatccggggtcggactccgcggtcgcgatgtcggactggggtcggcctaacacctttcggcttcgatatcggctgctctttctttctttaacttggattcccccctctacataccacccactccaggcctagaaagctcacttccaatagtatatagtcgccctaatgaattagtctgtaatggaaaaacggaaagaaaaacacatggcaagtacacctgaattgacggattttccgagtgtgtaccgaggctatggtaaaagatgccggattcgtcgcgacgatctcaaggttcggggtaggttccctgtgtccgagaaaagcaccccgtggcaggagatcttccagagcgagactggtcggttgaatgagattatggttctgtctgcttgacgccgctaagtctgcacgatgctgtcgatcctacacgatgctgctgagtatgttgcgccgttggaagcctcgatgtaaacaattgaggttcaaactggttattgtggggaaaacaagcggctgtggggaaatgaactatggtaaatgcgggataacgaacagcgctattccgcgtgttgggattgtataccatccccacttgagatgatagtagctgctgccagggacgcactgtccaatcacctaagtgcattgggggcattggaagaagaggaggcaaccgcccgtatcggcgaaagcgaatatccaattcgccggctatagacgggtccagcccctttgccgagtcacttccccgggccggggtccgccacactttcctggttggatctagtggtaaccttatttctccgtggatataattcctgaactcgggggagactggtaatgccaacgttaaatagaaactgagtccctagagtctctagatatctaatagtaatggggctaataaggatatctcaaagggctctgatatagaatatagcactgtagaggcgatgggaagtatgtgtcttcttcttgattggccaagccttgttcttaattgggtaactcaattttccaagtctcccccagctttttacgggtctcttcaaactgtgacccgatcatttgtccttcgacgtccatataggccaggtggatgcagttgatggaccaaacagggacgtcacctcttcacgatcctccgaatgtcggaaattgaagagaatggggacgatggatccggggtacgcatttccgattttccagacccaattggaactaagacgatatatgattacttggtcgtatgcgggggtcgcggggtgtctgtgctctccagggctgtctctagggttataaaatctaatccttgtcccaacacctttttctctaccttcatactctggaaggaagaactgaacacagtccggactgcaaaatgggcatattcaagaatagccgggtctatgtgctcgccacagtggcatatacgggttcattcctattcggtaagacaaatctctaccattgccgatcagatgcagcatgctgataagtttcccgaaaaggatatgacacaggtgtgatgggaagcgtgctggaacttccaagtttcaaggccgattttggactcacaactggaggttctggtttttcgactgccaatgctgaagtctcatcgaatgtcgtttcccttctcactgccgggtgtttctttggtgctatcttcggcgctatagccaacgaacggtttggccgtcggtattccatcatgggattcctgacattcttccttatcggtgctgctgtccaaaccgccgctaccggcacgctagcctatatgtatgccggccgggtgattgcaggtttcggagtcggaggaatgtcagctatcaccccaatcttcgtgtctgagaactgcccaccggccattcgtggtcgtattgctggtctcttccaggagttcctcgtcattggtatcactgtcgcatactggctttgctatggcgtggcagagaccctccccgccacaaccagacagtggcgcatccctattgcattccagcttgtgcccggtggtctaatgatgattggcatgttctttttgaccgaatctcctcgctggttagcgaaagaaaatcgtctcgaggaagccatcgaagcccttgcatatatgcgctctgagccggtcacaagccttgtggtccagactgagatggcggaaatcaaagcggccgtcgaacacgaagtcgaatcaacacagggcctcacttggcgagaagcattcctacctggcaaccgtcttcgctttatcaactgtttcttgattatgttctggcagcagtggacgggcaccaacagcatcgggtactatgccccccagctgttccagacaattggagtcaccggcggtaacacgagtttgttcacaacgggtatctatggtattgtcaaggtgatatccactggaatcttcctcatcgttggtatcgacaaggtcggtcggcggtggtctcttattgctggcgctatttggatgtgcacaatgatgtttatcctgggtggtgttctggtgacctatcctccggatcctagcggtaacggtactctttcgtctgcatcgctcgccatgattgtcatgatttacctctacgtcattggctattccgcatcgtggggaccgattccatgggtttacatttctgaaatcttcccaactcgccttcgttcctacggtgttggttgcggatcggcaactcaatggctcttcaactttgtggtgacttatgtgactccctccgcaattggcaaccttggctggcgaaccttcatcatgtttggttgcttctgctttatcatggctatttgggttttcctcgtcgtcagggaaacgaagggtcgctctcttgaggagatggatgttctctttgagaagttccatgcccttggccgtttgcctgatattgaaattgcacaggaaagaaagctttcatttgatggtgctgctacctcggttcataatgaagtacagggtgttgagaaagaggattatgtgaagacataaagagtgtacagggcatgtttgtgatggtctgatacctgtttatgtatatagttgttttatggagtccaattctacgtctatttggttatgtgtgtgcataaacctagtcaattacctgtgtatattgatcgaaatcagaactggtcggcggaaaatatatcctctcagggtgcacgaacatctcgactagggtttacaagaaccttcagatgcgctcttacaacatatatctccaagaaggacaatagaagactcaacctatcgaaagttagacagaggtagctacgaggaataaatttcgcaggagatgatggattcaaatatttatccgtcacattcataatgtttaatccatgagagatggaaatgtttctctttcctttcctcatacttgctacctatcaatcaaaaatccttgactattggtaaactactatataaaggaaattgcattcgaaatttacgaataggaaatgttttctgttttgtttcgtgttattgctgttctctccggccgttcggggcagcattataaaagctcgtcaatcatctattccctaattccagagtcgaagccgttgattctctcaataacatattttatatcaaatttatatatagaaaagtatttagttgttgaggatcagatgagaaacaaacctcacggatgaatcaaaattacctaatcactgatatgccgaggtccgtgtggagagcatgttatatcaaggttcaagcataaacacatacacagatattgtagaatcacgcttgaaccaaatcaaaccatcccatcaggaaaataaaatggccaccgcagagtccaaagctaggaggcaacgcaagcgcagcgactatggcttccaccaagtacaccagacccgatggtcagtaccagaaccaccgaactagcagccacgaaagacaccgacactaacacccacaggttcgacaacgacatgtacgcacacctcaataacgcagtgtacacgcacctcttcgacacaattgcgaacacgtatttaatccaacactgcgggatggaccccttcagcgtgaacaacccaaccccagcgccgactcacggccagccctccaatttcccctcgccatcgaacctagaaagcaacgccaaccaaatcggcctgattgtctcgacacaggctgatttctttggctccgtgcgcttcccggatctgctggtggtcgggctgcgcgttaataagcttagcaagtctagcgttacctgggaagtgggtattttccgtgagggtgaggaggatgtgaagatggttggaacttatacgcacgtttttgtgttgagggagactatgcgggttgggaagacggggatggaggagcggactagacggggcttggagaagttgcttgttagggaccaggcgaagttgtgagggggttagaatgtcaatattggccgctgggctgggcttgtacatagttttcttatcggaatataggtagccccttgcattccagggcagtcgtctgattgtctggttatagatagggattctaacttgagattgatcaaatggtccctataggaattcgagattcgagagaaaataagcgagatatagcaagacaccttatcttgatttgtatggtattttgtcttaggaatgtgagacgccgtgaagaaaagacaaaaacgtgccccgtgtagatcaagtagatcatccaaaaaaccctagatcattaaaagtctaatctaacctgaaatctatgagccaaaagaaaacccgaaaacatatccgtcgccgtgaccaaaaaccggaaccaaagacttttgtggttatcatgagaataaaagagacacgctaaatcgcttcgcaatatcaaaacaacagaatggtaatacaagtatgatgaaagctcaatcataagaaggattgtcatctgacaacctcaagagttgtgggtgagacaaggtgctcattcaaatttgccagcaatgatgctgctgcaacgggacacgctgacactgctcggaggcgaggcgccgcggaggatggtgtatccatcttcatcgagccaccacttggggtaagggccaagaatgaagttgccctgagcatcccagccagcgacccaatgaatgccgtcgtcaaggaggaaaaagcgaagcttttcgggacggccgcccttgtgcagcggggcgtcgaaccagcggcagcgctcctccagttcggattcaaacatgtaacggtggaggatgcgacagtagactagtgcagcagggactttttcatcgttttcgcacccatcccgatggatgaggtgccatccgcgacctttgaggaacttgtatgttcccgggacgggggaatcccagtgttgttctttgagattgctgtcacggtcgcccttctggaaccagtaggtagggcagaagatggtgcgcgcacagaggaagaggttgggtgccatgattgaggatggtatcaatgaagaaaaaaggttatgtgcaaggataacttgtccacgaaaatcgggggaggagtccaagttgatatagaaacagcactggtgtacaaggaatctgaagggctagatcgggctataagtcgacagccatggtgaaaaaaataataaaatatcaatcgggtcgaaatccaagttgagataggaatttgacgggtcttccgcgttcacgggagcttggtcaaggaccgagaagaactttttcaggagacaaagaatgcagaagggcacacttggcacggggttgtgatccgaggcaaggactggttgggaatgtccagttcaaacagcactggccagacagtaaggtgtattccgttatcgatgcggtgagcaggggttggagtgttttaagtcgggaaaaggggtcgtgataagcttgtagctttacacgacggaacagcctttgtgataggaaattgaggagggagggtggaaggcgaatagggagagttcaacagagcttggacgtgcagcaatcggcaacacgcagtagcacgcacaacgggtgttagagctcaaccagagcgtgtgctagagatagggcatttaactggaggaatgtcgccatggtgatgtgaggaagatatatataaaaagggaaaatacgaaaatccagaaatccggaatgtgtgtttggatatatttggcggtcagatgtgtaacagggaaaaagtcaatcgacccgctggacagccacaactggcctgccccgagacaccgggatttttccgggctgacccgcacagccttgagtggctgaaaatggctgaaatggctgaaatggctgacatccggtggattagctaacccgctgacctcagagattttcacgtgcggggactagccgaggcttggcaatcccatcgtttggcccggggatttttctccgtctcccctggttatcctctttagggccgatccttttcctttgctccgtacggcgtacaccgtcatggcctccccaataatcgttatggaccgttctgactcaatattataatcaataatgccctcgaacacttggcatgcattcctaacgggaaacttccaggctgcagaattcttcgtggcgcagttctcggcctcagccctatactactccgtatgtttctcggcattttaaggctggccgagtttattctggtctggactatttgatgccgatggtcttggtttttcattccccagggaagcgttccacgaccttcgattgaaagattagcctggctatgatcagcataactgttatggtgtgatgactgcatgccgcaccttttactcatcattatctaggcctgagacatccctgtccctgtccatgtgcatgcataatcacaattctgacttgacttgtcaacaaaccagaaatcatagctctgccacctggtcgagagcctcgcagctacaggcgatcgccaagcaaatccttgccaattttgcaatatgacacgacgcacggcgttaacgataagaaatcctttaataataattggagagaacaaaatcgacagtttgaatttctttgatatctgaaccctaatctttctttctttttcatgtcctcgggccccttgtgtgttggccttctttcaaactgccaaggtgagatgattttctctcatccacatcatttgcagtccctcgggccttttcgggtttcatgttccgtacccgggccaagcttactcggggctcatcaagttgagtacacaacataggtagtctaaagagggtttctaaaccaggacactggggaaataagggatacttagccagaataactgcaacatactacatacgtactcaataaaacaacggtctttacttgctcagtattacttccacggccaaccctaaataatgtacggacttgagataatgtgctgcaaataggtgctgtgatgagcacatatagtagaacattatgcgtccgttgtacccgatgtcaacgagatgacgtgaggaatgactcgactaaaagacaggagtcgtggatcttgctattaatttcaacacacgtcgagtacctccactcccgggatcaaggcttggatatatttacgttatgtacaatatgcctacatagcggtcgcccacgatataaaccaaggactaagacaagctctaagacataggaatactaagtcgtgtgagccccaattccactactccgtaccccgtatgtactcccatcttacccctttccttccaaaggcttacctccttccctctaagcggcatttctccacccaggcccaactcgtccacgccaacccaccacctccacaccagtggcgccaccaatccattctggcagctcgttgaggtcatcgacgttgtgggctatgcgtcaactggagcggaaaatcggcctagcaccaccgcaccgcaccgttacgtattacggaaaacgcgtcgagctggcccatcacggcgtccacgcgctgtacaacaaccccgacatgcatacatgatacgatgtggatgtctagcaagatgaatggatatgaggactacgccggcgtaaagcatgttcggaacctgttggttggcatgtctcagttaagtgtcactcctgtctgcgatcatgcgatggatccctgcatccacatgtcgacagccagggacgctgcggcgccaaaagtaccctgtctgcattcagggcttgggtgatcccccggctttgatgccgctcatcggcggcgaagagctaaatataatcagtcgcgacgtcctgctgtctggacttggcgtctgcccccgagtaccttgataaagggatgcgctggctttatacgtcttggcgatatatagtgtacatcgagggacccggacccaagagttttcggtttttctcagtcttcccttcactccacaatctctcccccctattaacgactaagcagagagagagagagagagagagagagagagagagagagagtcacctctcgggtttgatcctcctgtcatgactcgatgttggtcctcgaaaattattcagatgtggaagacatggttgtctaggacgagaagcattctttatgttgtgcctgcggctgggggattcatggggcgaagatcattgcccttgttgtagaatactgatgggacagtgttctaaggccttgtttgtcattattagttatacagcccgagatagttttgtttggatagaactaaactactatcgctccgactgtcagctggatatcgccggatatttacataagaataatcaactcggtatctttgactcggctcaaccggcatgacaaactgcaagtgttgaatgatcgtaataggaccactcggattttgccgataaatagctcaagtgtctcgagcaaggaataggcggcctccgttggacttccgcacctgaaatatgcgccaaccgtgtgggacatcgctatcatttgctccttccgttcggattcgtagacaagcttttactaaggtttacgtggatcctcggtgacacgacggctggcgtcggcggccaatgacagagctcgtacgatgacgaagctttcctttccggtgggaaatgggtcgacgttacatcggggcggactgataactcgctgcttactactccgtattggacagactgttgatagtctatcgtagtggttggcacgcaatagcactatctcctgtcgacaatgggattgtctgtcctgtatatgaagatgatattgtccatagagactcccacttttgccctgcatctctatctgggctttgaccaatcatatacgtctgttaatattggccgattactatcatggcaggcaatatcttcggcgccaacgcgggtgctgcaaccgacgctcatctgcacgagaaagaaaaaacggacaccaatgaccctgccgtctcgatttctcgcgagcccccgtctgaaatttccgatggcaatcgttcgatctacttggattctagcatcaccttcgagaactacgtctactgggctaagcggtcgcgcgagattgaaaagcacatctcgactgacgatgtgggatttgcgcacttgagcaacaagctttttcgtaaaaaaaagtcggacgctctagtgataatgcagggagagattgaggaacaggatgcctccgtcatgaaggagtccagcaaacctaccaacacaatgaacggcgctagcacaagtgacaattggggcatcacggagacagaatgggaacaggcacagcgggccgcgcgaactgcaacatggggttcgatcttctatctcatttccacggacatccttggaccgaccaatgtcccctgggcaatcagtcagatgggcttcggaccgggagctgtactttacactgttttcggcgccatggcttgttattccggcttgcaactgtggaggatcttcatcggtcttgactcgactcgattcccgatgcgcaattatggcgatatggctttccgtatctacggagactgggcgcgcatttttgtgaacgtcctccaaagcttccagttcttcctcaatgtggccctgcttattgtaagcaacggacaagggctggcgcagatggctgtcggtgccaatggcaatgggttcctttgtttcatcgctgctgaggtgatcttcatggccatcggctttttgctcgggcagatccgtaccctgcagcgcctttcttacttggccaacattgcggtctggctgaatgtcattgtcatcatcatgaccatggttgtggttcatgagtatccccctaactactcagcctcgctgactagctatgggacccaaaagggacccgtgcagacaagcgggtactggcctgcgagctcaaccctcaacgacaaagtcaatgctatgatgaacgcggttttcgcgtacggcggtgcaaccctcttcaatgagctcatggctgagatgagacggccctatgacttctggaagggctttatcattgccgagatattcatctacgtttgctaccttgtctcgggtatggttgtgtatagtgcgcagggccaatttacattcaatcctgcataccagggtaagtcgcatagcttccactgtagatcttgagattgctaacaaccacgcaacaggtattccaaactctgcctacaggttccagactttaggcaacgccatctcatttatcaccggcgtcatcgcagccttgctctatggcaacattggtatcaaagtcttctactccgcagttttccgcgacgtcttccgtttcccagaattaaacagccgaactggcaagtgggtgtggattggtctcggtaagctcagatatgcatcccctctatctgtgcacgcattgataatccctctagtgcctgcctactgggctcttgcctgggtggttgccgccgcaatcccgcaaatcaccaatctaacatccttcgtgggagccgcctgcatcttgcagttttcttacacgttcccaccaatgttgctggttgggttcaacgtccagaatgatgcgatactgcctgatgagatcaattcgacaaccggccaggtgcagcgcatagacagcggaatcaagagatggattagaggttacaagaagaagtttgtgtggaacacttttgatgtaatctactcgcttcttgctttgtctgccgctggtctgggaatttgggcttcggtcacttccatgcacaccagtttcgaggagggtaagctgacccatttcacttgtgcgaacccggctggatagatcaggtagaaggcaaggatggaggaacatcaatcctacaagtacggagtagttaatgatagacttcatattaaatcaagacttcatccattcctcactatggaccaaactcgagggattttgttcgagttaccccgagattgtaggaacgatgcgaatactgggtgatactcctaatagtattcttgatccgaaaaattatttagaatcaatatgtccatttacctggaaggtacaggacggcctccatcagtacggtagggggggggggtcgcattggccaaagtggggtcgctggtataatctcatactcctgaatgagagatatggagaaaagttccttacggaattatgaagttgtctcgatgcaatcttggccgagcggtttaaggcgccagacttaagtgaacactaactagtttagtgtgcgttctggtcacgaaagtggcgtgggttcgaaccccacaggttgcatacatttttttatactctcaaatattactatatttggtatatggcgttggtaggggacaggcaactgtactttccactgactataacaaccactaattttagtgagcgttctggtcagaaccaattatgttgtacgagcttatgtacgtcaggactttgtcctggcacacttttaccgcctttttatctgatggagctccaagtcctggtaactaatcttgcaactactataaaacaagtgaacaccaagactaggagtttatcagattgatgttgagtattatgatgacaacgagaaactaacaatacgttgaaagtggactataaaaaaagaaatgcaacctgtgggaatcgaacccacgccactttcgtgactagaatgctcactgaaacagtgaaagatgtaatctcttgagtctagcgccttaaccgctcggccaaagttgcgaaatcgatatttttagaatcgatatagtgttttttgaaccggatatccgtgaatgttcctacaggcaaaaatcgccgcgacaccaacaaacgctccttgacggcggcgcgagtaatacttatctcgccccgtcattaagaagttgaactgtttcataaagccaggttcccgttcttagtcaccgttgccaacgatgaaggtactatgacaggctattcgtactattatacaggaagcctgggaggcagtgccagaaagcaaagcgagggtatgcctcgaagaacgcaagacattattacagacaatggcggggcaccaattggtaggtggtatgaaatgggacatcttgtgtctcacagtatcctgcctaccgaaatctctagcagagtatcaagccaaagtttcatatagatagcgatgcggactatgtactagaagtggtatgctatacgggatttgatagattgcatatatcactataaaacttcgaaatagaacttcgaaaagcagcaaatctatatgctagggatgaaaccaaaaatcaatgcatcgagatgtcatggaagaccaagaccaaaacgctatgctcgtgaatttttcatggcaggtcagcagagtggtatcatgaagacaaagacaaagacatccggagaaatatgatatatagagaaggtattttcaagaaaggaaccctaaaagacaagatcattagttcgtagccgcagcagcctccgtggcttcgccgagagacacgttcattcctgcggcctcggagagattaaccagaccaacgccttccaaaagcacagagccagtctttgagtctgcggcaaagtcatcatcacccaaaccagccgggatagtcccatttccaatgacaacttcctcgccttcagcagcaggaacccagtccggacactcgcggggaccgtccatgcccgcaggaggcaagccccagcgaggcatagggctgcggtaagcccaatcaccatcgcggtcggcatacgcaacagcatgcaagaagatacccagctcatgagggcccgggtccgagtacagctcagtgccacagacttcacagagatttccggacagacgctcgcccttgcgcttttcatagtcctcagctgcggccacctgctcgcggtgcatgatctcgttgacaagcaccgggtcggtgcccggcgggacattcggcgccgcggtcaggtgtgtgcggtacgagaccgtgtcggggatttccgtcttacccatgagagataaccgcgcgacgatctcttcatcgcgctctgcggtcacctcggctttgccaagctcaggcccgaacacacggcggttggagtagatagggtcgttggtgatcggatggcctaagaactggaggtggacacggatttggtgagtacggcctgtcagcgggaaacagtgcacgatactgtagccctcggactcattggcgaatgccgggactggagtagcgggacgctgctcgtcgctagacgattcggtctcctttgctgcctcgggagggtagtaagccaagcgacggaacttggttgtcgcttctttaccggtggcgcgcacacggttgagacccagcttcgggctcacctgcatgattggctggtcgcagacaaccacgccgtctgggaacttgcccttcacgcgcgcgacatactctttctgcacggaccgggccttgagcgcggtggccattttctcggcgcccttggcatgctttccaatgaacataattccagacgtcaatcggtcaagtcggttgcatggacgaggtaaccattcggagctgcgctcggatcgcaggatttcgatgacggtgttgaagtggtatcgacccgcggcgtgcaccggtacgccagcaggcttatcaatgaccaagaggtcatcatcctcatgaatgattccgacaggaaggctagtaacgggcggttcgtggcggtggagggtgtgtgagatgacctggccgttcttaagtgtcgtttcggggcgggctgtcacaccgttcacctgcacaaggccatcctccagggctttcctctggtaattgtcagtttgcgattcttctacctgaagatccacatctcgacgcattcacgtacatagtattctggcttccggtcgcgaaactcggaagtgaagatctcgaccagctggcgaccccgccatcgctccttgcagttggtattataagtgtaatggtacggtgtgacacgacggaaaccaccgtccaaatagtaaggcgcaggccatggatcgcaaggggtcacgagcacgtcgggagtcttttcaaccggtttggaggggggtacttgatcgaccgtcgtgagggccatggtgggcaacttgagcttgccttgccgtagcaaataggccgtgatacgaggtgagtgagccagatgggcgacagaggtgccagacggagaattgaagagacctggaaagattcgagattccaaaaaaattataagaaaagttaagattcaacaagtcgccccacatgaacaaataatatcacattccacagagcatttattgtctgccccagaaatttaagtatgcgacaaccaatcatatcgatgataaggtggaaaagtaaaaaaagatatgcaacctgtgggaatcgaacccacgccactttcgtgactagaatgctcacttaaatcagtgaaagaggtaagtctcttgagtctagcgccttaaccgctcggccaaagttgcaagattgatatttttagtttgaagatattgctctatgaatagctgagcaaggcaagaaattatcaaacatcgatagttggactatcggatatagcactcataatcgcgccatggacgttcttcgaaaattgttcgaagagtcagttctcatcacagagccacaaatcgtatgttaatcgagacaggccgcttcatctttgccatctctcggctacggcatgagtttagcgatgtttagaaaaccaattaatttcaagaatagataagtctagtcatggtaaatcaacccttgaacgataccatacaaaaggctaccatctatcaggtaaatagttccagacagagccaacgcccaaattgaagagaagataggcagaccgtcactgctaacgctcagatcattgtgtcttcttcgccttcgcctttttctctcttcggcgcttcagggcatccggagtgtattcggtgtcaaggaggtagtcccaccagcggaagctgcttgcgtagttcccaatgaatttctcatggtggaggtcgtgatgatcagcaccagcccagaaaggcaagaaatggtgaagactgtaaggaaagtcatagccactgtgggcatcgatagcctggaacaggcgcaacacaatccagatatacatagtgagaatatgtaggtcaccggtgaaagcacaccagaggatcgggcagctgacagtcccgaagccgagaatcatcacttcaataggagaagcatattcggcagccaaaccaaatggtgcggaatactgatggtgaactttgtgaatcgccttgtagagtggaccccaatgaagagctcggtgcataaaatagtgccaagtgtcctccatgacgaaaaagattgcaatctgatatgccatagtccagggagacggaaaaggaatcgatgttgatagaccgcagaactgggccattgggtggaaaagcctagaagagccgttagtaatccatcgggcccgagaggcaaacgtccggtagaataccactccgtcgagggcaggaacgtaccagatttgaggaagttcgacggtgaagtggctcagaagcacaaacctggcgcagtcccattgctcgcgtagtgaaggcactttgctctgaagcagaatgttagtttccatggcagctggaatcgggttgatttcggctagtgccatgtgttaggcttgccacttacactttgaatcttgtatctcttgaagaaacccaagctatcgatgaagacccacggaagagagcggccgaagtagaccaactcgtggatgaggaaggacatgatgccagtggccaggacatcattctgcatccacgcataccatgcgacccacaatctctctgccacgctcagatgggtattgaatttggtgatatcctgatactggccccaataggtgccggggggcagcacggtagaattcctagggaaaaaaagggtcaatatgcgacaaattccacaaaagagtataattcaaccacccagggggggaaggagacatacattgtggttcctagcaggtcttgaataagagagaagaagcagaggctgagagaaggagaagactatttcgtgaagaggggagtgaaaaaagaaaggatctgggaagagcactatgtgctatatagtgtacagtactccgtatattccctactattaaatcccaatcctgttaaattggtataccacatacaggaaggttccaggcagccaaacagaggcgggcaaatgcgtattatccagtttggtggggctcggatggctatcggcccgtctgtggcctgacctttgcggcgatgacttttatattccggcctggtctcacctcctggtctcaccacttcgggaatggcctgctccgagtcatcgaaagcagcacttaatgggctaatttaagtatccaatcaaatttcttcttttgccgatatcttatccgggagagatagctgattaaaactactgtacacagactagcccagcaagccctaagaacctatacagcacaccatccacttcccaataaacaaccagttcatgtataattctttaccagtttcgcttcccagccaacgctacgaatattgctatttttcaaccttgatgcaaaacccaaccagcccaaaacataactacgctaaacgcctgataatgtatcccaacaatagacagacgcaacaacccaaaatcccaaactctagctggtcacccacgccacattctcacactgctccatccgctccaacgcagcatcaacccgccatagcatcgtccctgactgcgtgcctggctggggcttcccacgcagcaccgcattggacgttgtgcagcgcgagtcagctgtcaggcggtactggatgcattctggatctgcagcgcagtagtccgcacaggaagcgaaagaagtcggcgtcttgggtcccttgtaatcttctttgtcgtcgcctttgctcgcaaagttatcccagttgtctaggtggtctgcgagggttgggcggatgaggttgcggaagatgtcgctgtatgtaagaacgcttgagtttgactgggctttttgtcagtaacatattccagggagatggatataccgccaaaaatgggaaaagaaagcaactcacagtcgcaaaccactgctgctcgaattcccaaaaccgatccacatccgccggcgtcatatggtggaaagtaaaaggcgcaaaacaccaaggtatcttcgcataagcctcatgcaacatatcctgctcccaaaccgactgagtagtcacatgcggccaagaccaagtaagcctaatacccgcagcagcaagcgccctcccaagcacacaatcgcccgcccattcctggttcgtgatcgcatcccacgcatcaacactcattttatggaaatccgccacggtatgaatagccgcatgagacagcacaaaccccgacccaccatgcgcaaacaaagtcgacccaatctgcatctgattccccagatacagcttgtcttcggggttgaaatgcgccagccacgcgagcaggttcggccagatcgggtacgtgtctgcttcgaggaagacgaaccacttggcgtctggcttcgcgcgcagcgcggtgtggatcatcgggaggaatttccacttatccagcttccagcctgggttgtccatcatcccagctgggccgttggcgactttcgtatggtcttgggaggttagggctgtgtgtccgcctgtgcgggcgcggttgtatatagcgaagtcttggttgctttgtttgagggtgtcggagacgttgaggaagacgtcgtgggtgcgtgtaccggctatgtcttcttcgaagtctgagacgattatcttgtgcggcacgcagcggagagtcgttcttaagtgtacagggactttgttttgcgcttccgtgatgcccgtttttaccactaccagcactgagtccattcccgtgtctgtcgggcaggatgatggtacatggtgggtttcagtttttgagtcggtctcgttgtatgtatcaatcgttagcccggagacggatccgaccacgtcctgcgtggtctttgagccgaaatcggcgtggataaattggagtatcaagaggatgagaaccaccgggcccaggataagtacccagcgaccatatcggggcgggagagaaggcatgttcagagattgaaaactctagaggtggggaggaagagaatcggagaaagcggcttcagtgaatatggaaagatctattggtctccatatccagatgaagaccgaaatataaaatataaaagtcgatgggatcttcaggaggggccttgagttcttaagtgatgggcgcgtggggctgattcaagttcaaggtctatgtacatcagtgacatccaaaccagggctattatggcaccattattcatgagggttagttaattagtgtgagaccttgacccggataaaggatgtcaggtatgctgatcctgtcctgtcctggctctatcctcctgggttatgtcgtgcttcaatgtcctctcggatatctagggcttctttgtccgtgttacgtacgtcaccacatggggtgggtccgatgatctgaaacgtgaggtgttgatgtgatattgatcgataatagggaatggagtttcacattatgttaatatgttagagagggtgggagtaaaggtcaagggaagtttaagaccacttgttgcagggttacgatttgcctggtacacccatgcactatactggtacactagagtatgtacaactacatgtacaaggccagattagaatctgagacacctttaaatatcttggaaccaaaaaggatttttgcaatttttgttgtcatttcagagaacaattctctcgcttcacagcgcccggcactatgacaaggcccgagccggacatgccatgcacaatccttaaatttcgttatcgccagagaagtagtatcgccatacaaaaaccccgacctcgtgcaccaatcccaatgaaaaggaaacaaactgggtttattccatttatgcctcggtggtgacacggcccttggggttagtgaccttaacaccgagagccttggccttctcaataatctcgacacgcttgcgggaagaaacggcgtggccgatcctgtagaaattgttagcgtatgactcatataacacgacttagtcgctccaacaggcgcaggacgtactcagcagcgaaggtgcggttgtgcatgaggaggagctcaacgtccttggtgttgtggacgaggaaagccttgtggccggagggcatcatgtggcgggtcttcttgttggaaccgaaaccgatggagggcatggccatctggcccttgaaacggcgacggacgcagttatcaatacccttgggcttgcgccacgaggcgccaacgcgcatgaaccggtcagactggtgacggttgaagcggttcgtgcctaattgcggtcgatgtcagtcctccgattgtgaatgtgagaaatccgtgctcttttcagcctccacgactctgcggataatgtcgcccttcgatccaagacaaatgttgattttttcccagtgatcctccaatgctcttcgtttggtgcatcttgctgagcttgcttgtttcattttgttgacgatcgaagggcgatggtatccagggcatgggtacgaaaaggaatggaacaggtgatcgggaacatacgcttcttcacgatagggatgtgctgcttagcggcgaccatctggaatcaaaattagtgactgaatcgaatatcatgcgcatttggtgactgaccttgtcggtattgttgggtctcgccgggcgttcgagagttgtcgggttcggagttcaatctcgaaaacttctctctcaggttctcccgcagcagagtgggagacccacactagtgcgctttgggcgaactaagcgaaagcagaccacttatgtcagcctagggctggtccagccctagccctactattcctctttgggcgatatctggggatgttctaggtatacatgggtctctcattatgctgcacgttcatcttggggattctatattgttcatttatatgtcatattctggactgatttctccagtatgtaactatcactgcaaatgcaactgaaccttctcgccatctttctcgccactccgcaacatctgctccaagatctcaagatccgccaatgcttcctcgggagactgtctgctgtcgggttttccattcacaattgagtctgcaaacgcagcaacctctggcaaaacacccctgccatcaaactccacatggtgcttctcgccattaactgtcacatcatcgaagttcaaggtgacgacacctttctcgcaagcaaactcgaaaatctgatcattaaatgacgatccccacgacaaagagataacacccgtagcaccagatttagtcttcgcgacggcatccactgtatcaacgggtggcaggaatggtttttgcagctgcgactgcgccgacagaatgctaagacgctccgtggggcctagaatcaggcgcagcgcagcagtcatgtgcacaccaccgtccaaaaggaatccaccctggtattcaggggtcttgcgccaggcggtgtctagttcaatatagtcagtcgctataagaccattcatgtagttcactgggactggacgtacggaagtacttgttctctttgtccatcaggctgtgaacgttgacgcggaaattctggattttgcccagtttttgaacttgctctgctgcgaagaggaactttgtgatataacggaagttctcagcgacggcccagaagaccttactggtgtcgatattactcttgtaccagttcaaaagttcttgggcagtggcgacatccttagcgataggcttctcggacaagacatgcttaccggcgagcagtgctttccgaataaactccggctgaaccaggatgggaagcctgtcggaattgagagttagtgttttactctgtttgagttgaatctagagaaatcggggtgatcccgtacgcaataatcacagcgccgatatctgaacgagccagtagatcggtgtaggacttgccggagcctgagtcttcggagtagagatcgacttcagacgtgccgctagcgaggtcctgggctgacttcaaggttcgagaatagatagccttgagttggaaatttgagacagcttggacggcgggctgtttattagttagttcagtatattacatagaatatgggatcattggagagtttgtcatactagatgctgctctttcgcaaagagacctgctgaatgttagccaatacaaacaacgtagagtatacaaaaatatgtaccactgccaatgattgccacgccgatagacatgattaatagtaataagtgtgatagaatcgagaagaaagatgtttcgttgcagtacttcggtgctattaaaggaagtccaacagtggggaacaacactttaaactgcgggaaggtccaaccttgacgcacgtcatttggtcggctgcattacctatttaagtagtacatcataggtgacatgcatgtataccgtctgatatatcaagttacaattcaagtcaaattaaaaaaaacacattcataaccagacaaaaagtcaatatgaactgtacactccataaccccggttgcgcccaatatcaaaggggaatccaaatccccaaatgcgaccaaatagacgccaaatcatgtccatcgtcgaataatccaatcgtaccggtcataagaagacaaaaaatccaacacatcaactcaaaaccttccaacgttccaatgttccaatgttgaaacccgtcattgattaaccaatgccctcaatcgctccacgcgcgccacagcattctccaacctctccaaccgaccgcgcttctccacatccctcttttccagcacagcaaccctctcctcaagcttcgcgcgagccttgcgctcctctgcgaccatctcatttgcctgactgaaaagctgcaccgtcaactcctctagctcggtactcgccagcgagagttgcgactcggcagcctcgcgcagtttctgctcgcgcgcaagcgcatcctgcagctcggaggtgtgctcgctgttcgcgggggacatgtgtaggagtggtgttcccagcgcggtcggggtacttgggagggggccgctggatgctgctggtgcgggggttgcgctgccacgtcggtaggggaggaaggaggctaggtttgtgaggcggctgtggtatgtttgtcgttgggattgagattctgaggatgttgggcgctgtggtgatgaatggtcggctcgggaggggggtcttcccagtgaagagctgctgcgcggggtgtggtaggctccttggggctgggaggcgcggagacggcggagttcgtcttcgtactcgctaagtttggaggctgtttgcgatcgggttagcggggattcttgtttttaagggttggattggaagaaggggaagggggggaaagtattgtcttctctgtagacgcgtgatcgcattcatgctacacttgtgtgtatgtagtctgtagagatccttcacaggcttacctgcagccaaagcgcgcgctgtcaacgtatgcacttgcccctccaactcctggattctatcgtgggcgccagaaccatcttggggaaagccttcaccccaacacatgggacatttattttctgatataacgacacccttcatggccggtatgacaagcgtggtgacggatgttgttgacatggtatgggttttaccccgggattgacagggtttaatgttttgaactaggcgtactagggttgcaacggtgggttgacggggtttaagaagaacccaagtgatagaaagggaaaaggaaaaagaatttaaaaggctgaaaatcatacgaatccctggcccttcgaaggggtttcaattaaatccatgccggccactccatttcttggccaatcgcatctccttggttcctggatgatctcataagatgttagaatgaatgaatttgactggagactcaactatagtccaactatattcaactgtattcacactatttcgaaaacagacacagttcactatatactatagtgacatctcacaccctcggtcgttgtattaatatgccacgttcttcaaactgttcgagactagtggatcctatttatacccttgcgtccaatagtccaagtggaaatctattttccatgctattactgctaaaattagacataagagacatagagtctcagtataagcatcgtggaaaaggtctgttcttctcgaagtatcgtagatatgtatttatagcctaaagaattctacaaaaacaactttcggtgaacatttcattctatgctaagcggaaattcaattcaaaaaggttagtacgcagaaatggagcaaggaccatcgagacaactctgccatgcaaagaccccaaagaattgaattagcagtcacagaaagaaaagcaggaacaggaattgatttcgtcaacgttgtgctcatgagaggggtgctcataatgactattctcgcagagtcgtcttattcacatggccgagaacggagaaagaagaagagtgtcaacactccgacttccccgtaggtcccaatggcagacaggaacgagaaagaaacaggaccacccgtggtcaatcaaacggaagagaggagaaagttgagagaacaagaaaacagggcaaggaaaaaaaaataaaatggaacatgtagtattcgtttcgcatcggctgtaatggtcatgggcagatcactttgagtcacgcatgggaataatagctagatagcgaacaagacataaaatgaaacttttcggattgccagatcatcaaagcgaggactagatgtatatcggaaaatctagcccacgaaaaaggagaagagatcatgaaaccaaagggcaaaagagacgaagtggaaaggagaataaagctcaatcagaaaaagcaatctacgtccggcactgagaaatggcggaagcaggtggtaattatgagtgacaaacctatcccgatgcaccgctcaaggtaactagaccgagcagcgcaccaagaccggaatgaacctcgtccagaattaacccacctggcgttccggtaaatccaaggctcagggcaaatcggtcgttgcttcggggtatcgatacgtttatgcgaatcctcgaccagtctgtccacggcggttgttgcgcttgttaacactgaccgtgctccatccctcgtcgtcaccgccagcagcaggagcagcaccagcctcaggggccggggctctccagccgttagcagacgccttcttggcttcgacaggagcggcaggcgtctcctcggtctccttttcggtggccacctcttcgccatcctcaccggcccgttggaggatctcaaagttgccacctcccttgggggtctcaatggcatccttgccgttgtgctccacggcaggggctgcctccttagcctgcttttgcttctcagcaaacttttcggccttctcagccttagccttatcggcagcttcctgcttttggcggagggcaagctggcgtctctcctccacctggcgctcacgggtagcggtgtcaatggggcgagcggcaccgaaggggctagccttagagtcgctgctggctgaggtaggagtgggggcggggttatctgagatggtgcgcttcgtcaggttcaacttggggcggctagcaggggcagcaggagcggcaggcgtagcagagggggaggcgggggtgataggctctttgggggtttcgtcggggcgcattctggcgcgccactggttgtccatatcggcagcagtaggtgtgggctcggggcgaacgtgctcggggcggggagggcgcgagccctcgtcctgggaacgtccctcaccccatgcggcctcggttctccggaagctggaaccaggtccgtcgttgctgtgctctcggccaccctcgcggggcgggccaccggcagagggcgaaaggggtcccttgcgctcccagttgttgaagtcacggggctttccgtcggactcaaagttgctgcggcggccaccgcggtcgctacccgcatcggagccggcatccataccacgtccgaagctggagcgctcaggcgcacgtcgctggggaaggtcggggaggggaccacgtcgggaccagtcaagatccttgccctccaggcgagattccttggctagataatctgtcagtcgaaatcattacaaaacaccaaccttcggtacttacgaggctccgcaacactggtacggatggaacgtccctggaaagacgagccagagagatccagagccttctgcagaccctcgacggtctcgaactcgacatatccgaaacccttaggggcctttgtcaacttgtcttccacgagacgaacgttcgtcacgccacatgcagagaaaaactcggagatatcggcgtcagttgaatcgaaggaaaggttgccaacgtggcaagtgtaggggggctgtgtggggagatcaagaggctcccggacggcatatcctccacgctcgcgctctaatcattcaatctgtcagaacatggtctgtgtgtctggcgcggggaatcataccaaagccgccagagccggaggcggagccgtatcccaaatcacccgcggggcgacggttgaaggtggaagtcaatggctgggctgtccatagtgtaagcaagggtttcgatcaacgataagcatgttaggtgcacactacatactggctataaattttgttagtacaatttcgccgtttccatagtggggaaatctggaacttacaaggaaggggcatatcctccatctcatcagcccaagagccaaggcctattagccgtcagtaatcacctcaatcatccaaattttccagcatacgcactttcatcggccaagaaggtgctcatagacatcttctgggctttatttttgggagctagtaattcatcatgttagcaatcgcccatgaatattttcgggggacggatgtcctggaggacatggaaggtctggaacgaacccatgattgcggttttaagttgagggaaacgcgccgggatttgtgcgcgcttctcggagagtagggtgagaaagaagaaaaggtcaaacgatcagagatacctggtgaaaagaccaagaatcaaattttgagtgaagtagttgagtgaggttcaatatctgcaaacccacagtggaaaagttggtagaggggaagtcggctgcggcatggaagtggacgggttactaaaattttagtggtgacgctagcccaatcagaggcgagatcggtctataccagaactgcgaccatcgtcgaaatcgtttgtattttccctggaattgacgaatattgtgagggtaataggctatttgtgcctttgttcgcttgaaataaggcgggaagcgagaaaatgcgagttcttaccttgtctgtatacgatggtgcatttcttatactcggctaaaaatatatcatagaatatactgccaaaaaaaaaaagaatacgaggacaatttcattccggttgtaactttattggctataattttgtcattccaagaggagtcggctgcagtagcctccgttacttgtatgaatcgacagtatgacaagtccgatttatagatcgttccgcattagcgcttgatactatttcatatacttcgcctgagcctctggcatggaactattatatatatagtattgctgtaggccttttgggtagggctcaggtataacgaattttagtggcgtacctacatgtatgtacaacatatattttgagtactggaggctctgatcaggcgctgatcaacgaatatgtgccctcctcaggctgctagcaagatgcccagagatattgtattcccgaagaatatgcaactagcagtggacgtcattcctataccgcatcagcctgatttctaaatatttgtataacaagatgcaataacatcgcaaagctagcttgaatggatattcgagctttatttcaagccttttgacattgtgatagacagttcttggagattgcgtctcgtaccaaagtggaggtttggcttgtgagccagtaggaatcaatcgcaaccatatgaggggaaataaagatcgcggggctggcggtcttgcaggcgatcatctactgggcatgtgcaatgcggggatactatatctgggcctcgttcaccatttatctccaacatgattaaacaaagccagtcgccatagcatgaatataaaatatagaccaaaatctttcgaatattattgtaccaattctgcttatgccctaattcgtccatccaaggccgtatgataacattacataatcaggtacatcaaccgggcacgtgaccatattccttctgacttggattactgcttcgatgagagcttcgatgattgttacttaccattccacgagctttgaactcatgcatctctcgggttaaaaaataatgggtgaccaaatcaaagatatgcaggattttcagtccaacgctctcatgtctgcagccaaggtcggagccctcagcggttagtatctgcccttcgtaagattgtttggatacagacacaacggggttttcaaagatgaagtgctgattttccaaccaggaaccgctggcctgatctatggagcagccgctggagttgtcagatcccctaatcccatgattcattcattgtcatgtggcatccactggtttgcgtgcggctcagccttttggtgtatgtggggacactctatgtttatatcgctgatgtctaaccttaatcttgggacagggctacggagcaacatcattaaacatcactaccaagataaagcgtcgcttcaggagcgcacgtacacgagtgctttatgcggtggcattgccggcggaagtgtaacgaagttgatgggtaccgtatcccgcaccaaaagcacatattctggcatcacgtctaactaaatcatacaggaggccggctggttccgggggctatcattttctcattactcgggtactgcggccagagcgtcttcaaccgagtagacgcgtggcaaatggaaaatgcacacaagacatcgaaacctttgatgcagcgaatggcggaatctaaatggattccactccgcacactctctgaccaagaatacagggggatgttgagggaaaagctccttagcgtcgaggctgagattgctcttcttgacgataaaatccaggaactggagcagtctcgaccggtctctgctccaagccccaagcaaccctgaaaatagggccatgtgaaaataaggcaaatgcgaattgttgtacaatacaaggggagagagagacaaagaagaggacagagtcgagcataatgaatatagagcgggcctggagtccccgagggctgataaaaggatctcccctgaattcttgggtcgcgtgtcgatcaatctgaacaaacaactatataggaacattgtaggagtctatcggaatataaaatgcttgatagtatatagtctatgaaaagaaataacaacagagccattaatgtaaaaaagaagccaagttatgagatatgacagagataacttagcgtaccgctctttttggccagttcctccgatctgtccggtagcccactctcattctcccttaccctttagtttccccccggcatgattcgcctacactcattttattcgaatcagcctgcagtgctcatcctactgagactttgatgggcaaggtcgctgctgttctggagtctggagtcactgattccaaccagacagacagtacggagtagaaattcgggggacctaacaacagtgccattgaactccgacataacttcaatgtgcgagtcgacactgcctgtctgagatcagcccgctgctgatcgcaaaccgcgatgaccctctttaacccgacctcgattctcgtgggattcctcctcctttacctctcgtcctttttcatcttcgctatcgtccggatcgcgacgggaatctctatccaacggatcggctacttttcgctgcgccgaattgcatacaccccgaaggaaggaatacacattgaaatccgtggcctcggattgttgttacaccccccgtcatttgcccagccaacatggatcagcattcggttgacagaactgaaggtgaccgtggactcgacgactctgggccagggaaaacgcgacgcaccgcgtcaaccatccgaagaccacgccgcccccgaacctggcggcagaagcaaaacatggaggacgttaacacgaatcaaggaacgtgtcaagcggctacaccggcagatccattggttggccctcgtggacctgactgctatcgacacaaccgtccactttgtcaacgctggccaaatccaggtgggatcgctttctctttcagtcgacacgcggaggaagatggtggaacggggcaagctatttcgtcgcaagaaggatatgtcgcaagaccaacgcccagccgagtggattatgaatgccaaaaatgttttactcaatgtcgacggccgggagccaaccgagatattggataatgttggtgtgaatctccatggacttcttcacaaggatttggacggactgagagacgcctcggtggcccttaaaattgggcgtttgcatattccatatgacgatctccgcacgctattgcagcgcatcaaaccggtcaagaaatctgcacaggggtcaaatacggagaccgatgacgagatatcatttgccgatttcgtggacgaactcgacaagcctggaagcagagacaatgccattatacagacagtggcggactcaaaggggtttgcaagctcattacttcgtggtgtacaggagatacagattgctttgagcttcttccgtgtctcaaagggtatccaggctctgtctgcaggacaaacccccgtatatctgaatgtggtatcgcatgagcttggaattgatcttcatcggatggaccaaagaagcccagagcatcgcatgtatttccagcggaatgatgttgcccatcaggctcttcttgctgctatctctctttccgtcagcttaggcgacgaatcgggcgagaccgataacattctatacatccccatggctacgacaaccatcaaaaccacactgccttcgaagacggtgagcaccttcgatgatgggaatgctgaagagcgaaacacaaatgtcctgttcgcaaatttggtcgtgacatcaccctcggttgatctccaaccgcaacatgtttcgaggctgcttaaactagcacaaaatcgagcttcttctcctcgggcgaagaagcgagataatcatcgattgatttctcgactactcccgaaggcaagcatcaatatttctgttcacgaacctgtggtccggtttgttctccccatcgagaaagagtctggtactcccgatgattacaacctccttatttcctcgatctcctctatttcactcgatatcgagtcctctcattcatctgaaggcggtgcccactattccctatcgtcaatttaccgggtcgcctcccacaaattctattaccagactccagcaggcaacaaacacaatttgctcacaaacgagaatctggagctgaaggcccatttgaacgccactccagaggtctgtgtaatcgcctcaggaagtcttaacgagtgttcagtccacatgattgatggggatgtaaaccgtggaatccgcgaagtcttgcagcaattcatcacccagatgcaatcacagaagcgggtaccaataccgacaaatgaaaaaaaggcaagcgtgttgagacgagtgccaccatggctactccaatttcagttcgaagccacagggtccagtgtggaagtcgctggtgtggacagcaccgtttctgatatatctcgtggtgtatctctgcaactacaatcgtggacagcggaatacaaagctcaaaaaacggagacaaatgtcggaagcattgctaggcgacgcactccgagccattccaccattggcgatgaatcgccctttcgatttcccccaacctcgcctcctaaggctactcacacacaacgcggcgcttcagatggccggcgactggctttccacgcgcgtggtttcgatggctttgtcattgaatcagaggattatctggaacccgagccattcttctctttgcctcgattcgagattgcgctgagcacccactgtgatcgcctcggaccgctcctgcatgtcacatccgtgttcaagggcatataccttcaatactcactgtaccggttctactgcctcggcgttgccgtttccgtgatccaagacgtgctcacacccttaccgccaaagcactcagaggctgccgaaaacaaacccagggcgcctgcgagtgtctcgctaccgccgcctccggcatacaaatggtctccaaaaaaggagcttgtcacatacgacatgaaggcaacagttgtgcagctcaaggcaaacctgccaaacgatcctcaaataatgattcagatctacggacttgccggtgcttctcaacgtctttctactccttatgttaaagccaaccttgtccgcttccatgcagaggcacctaagctcaagggtgtttgggcaagaatcggaagtatgaacaacgtcaggctggatttccgaaagatgaagatgaaacatggcaacactttggtggaagaaaaatctatcgacatatggacagacttcatccgaattggtgtacctcatcatatggtgatgcaccgcatttttgataaccttatcaacacttccaaggctttgaaacagctgcatcatcgcttcaagaatggttgcagagatttcggctccttgagagaaccagaaggcccgaagaaggtgcctaggatatctattcgcagcaaagcgttgctcttcgagttggaggacgatggctttgagtggaaactgggctgcatctatcgagttggcctggttgaacagattcagcggctggcccgggaagacgccttccagttgaaatctcacaaagtcatggaatctgaccagcggcgtgcctcatctcggtcacgagccaagtcgagccatcggacaatgcgcagcgagcgaactagcctagatacaaggcgaagcaggagtgccgatgaacgcccgagatctagcgcccaagaacgcgggagaggtcggaaataccgctatgataccgaaggcgccacctgtctctcatcggagcaaaagatctctgtgcattctgcctggggccgacttcaacagtacaatgctcaagtctggaaagagaagatcgatgcagctctcatgttccagggcacttctatcaaacaagtccgaaatctcttctctggtgcagatgaacctcctccggatgtgaaagagaccgaaaccattcttgccattccgaacagaccgggtctgatgtcggctctgatcagtgatgttcaccttgttattgacaagccttcattcgctatcgatgagttccccagttacttgaaccgaatcggaaaggggatgcctatgtctatgaaatacggcctgctcatcccaatgagctttaacctggaaatgggtgaagcacgcgtcaacttgcgagattatcccctagatctattgcacatcccagccctgcgcccagggcagtccccaagacttcccagctggtctttgcggacgaactttgtcattgcagaagaatggcgtgaccatgaatccgcaagacaggttgaagtggaactcgttcctgcatctgaagggttcgacggatccccccgcgatgcgttcaagattcaggtgtggcgttctgttacaccagtcaagacctattcggaccctgtcatcgagataaacacaagtttgccgactagcatttcatggggtgtctcctatcagcctgttattcaagatatgatgaagatcattgagggtttcacgaaacctgaaattgatccctcggagcgggtgggcttctgggacaagatccgactcagctttcactcccggatcaaggttctctggagggaagatggcgatgtacatctgcgacttaagggctctcgtgatccgtatgtggtgaccggctttggaagcggcttcgtcatgtgctggcgtagagatgtccaattggatgtgcacaccagtgacaatcccatggaattcatgactgtcacgagcggcgaatatgtgctcgctattcccgactacagtgccgaagcacgttgggcaaacgaagctaccacagaggaggtggataacagttctgcatccagcgagcagaagaatgctgcccaattcaaaaaggttattatgaagctctctggcgatgtcaagtgggcagcaggtctcgtcttcgagcgggatagtgagaatgatgaaaggtccttctccttcaaaccacattatgaggtcattcttaagaaccccagattcgtcaaaccatccgagcagatcaattacgatgcctatcgtggcttccggagtgaccatattcacctttctgtctcgattattgcaccgcagaatagagactgggctgtcgacaatgtgcaaccgtcttcaagctacaacacaatccatctctcaccgcgattcttcacccacttcttcaattggtggtctcttttctcgggcgtgatgtcgcttcctgttcgccaaggatcgctctggccaggagtcacaaagaccgccaagaagttcaatcgtcatttggcgactgtcaaatacaagattcttcttgcaccccttttcgtggcccatatgtacaagcacaaggatcgcgaagattatgaagagagagctgttgtggccacgggcttgaaagttcgccttgattgcttgaaacttgatatccatcaacgtcgcgagcaaatcaaaacacaagccgggggccgttcaaaacagaccaggacaaccgcgatgcgtattaatcaagcccaaattgatatgcaatctgcagacttccgcgccgtgtccgccagcatcgaaggcacaacaccggaagacgttgagcgcaacaaagacgatatcctctcttccttccaacagcctgttccatcagttgacttgtctcgtttcacaatccctgatcacaatttggactgggtcgacatggatgatttcgtggagccggactggatccttccacaggagtcgaacccccgtacccagatcttacctttggccttcaccccgcgattcacctacttccgcaacacggatcactgcgacatcggacccgacgaaacgggctacagtccatttggggacgaaccgacccacgagtgtgtcatgtctgaaaccaacgatcctcgccgtgttcagattgagttggtcaaagaccgccttgcaacagtcgaggcacagattcgcaattatgaaagcacaattggggaaatcgaaatcaagcttatgaaagaagtagacaataatacagaactgaaagccgagcatgagttattccttcgccagtctgagtctctagcgagacgacgcaagttcttgaccacaactctcaatcgtcttgagagacatatcacacgcgacgagcggactccatatggcgacacacttggcaaaaacgttgcacccagcactgcttctttccgaacaggacgaacaggtacaaccgatggccgttcttcagccttggatggaatttactcgtcggccaacgatgagttctccagcgatttcgacaatcgtttcatgatccacaacatgcagctcaaatggaacaactcgctccgcaacatcgtattgcggtatagtcaccaagtgagccagcggcgtggatttgtctactacatgtctcgccgcgctgtcaaatttatccttgatatcgtggaagaacaggacaagagcgatcgcaagcagcctaaaatgtccaagacacaaacccgaagttcgagcgtcgatgaggatgaggaggaggttggagatcgcattgaacagttgctgaatgatgctaagcgctacgtgaatgtcgaagagaacgatccaccagactcgaacaaccaatcaactccgaacaccccatcctctgccaattcggacagttcgagtgagaatatcgtgccggaattcactccccagaacacttatcacttgcgtctcattgcacctcaaatacagcttcttagtgaaaagaaccagaagtcggtcttgcttgttgccgctaaaggcatggaactcaaggtcgtgtcaatcatggacaaagggcgtgtttcggatgatgtcagcggcttgatacaacgccgtttctccctcgaaatggacggtgcccagtttttcgttgcaacacagaagaaattgatgacaaacttgcaattctatgctggcaataagtacgggaatgcgcctggatcagcgtggccaccgtggttgactttggaagccatgtttgatttcgagttgaatccatttggattctctcgtattgtgcaaaagacttctgccaccctgcgttacgacaagttcaacaatcttcgcctcaagtataacgaagaggtgaacaagaatcaggaaggacctcaacctgacgaccaagaagaccgcatagactcgattagtgtggacttccctcatttccgcgcgatttgtgattctgcagagtactattccatgtacattattgtcctggacctcatgctctacagcgaaccactcgaaaaggtccgaaatgagcgcctagagaggatcatgctcacttccgacttcagtgaccttagtggcgccccggaaatggtgttcaagcttcaagcacgcattcgccagttggaagaaatcaaagagtactttcagatcaacgctaagttccttgacaaacagggctgggaggatcggctggccctcgaacgcgacttgtctctatgcgaggatgaacttttcttcatgatgaaggcaatcacaacttcccaacggcgaatggaaccgagttcgtccagggacgccggtgtccatggcttactgcgttggagcatatcggcgagcgaggtcgtgtggcacctgatgaaggaggcttctgagcccttgattgagttccaattgcgcaatgcttcatatgagcgaaccgacaatactgatggctcgaaccataacctggtatccatcgaacgactagtcgggttgaacttacttccagacgctatctaccctcaaatcatcgcgccttacctcgacggcggacgcaccctcgatgacttcatgttgcgcatcaaatggcacatgctggaggccgttgccggtatccctgtgcttgacaactttgaagtttcattgttcccgctgaagattcagctcgaacgcgagctgggccagaaagtcttcgaatacgtcttccccaacgtgggttctagcgcctttgaggctggtggtttctcgcctttcatgatcaagaacatgaagccacttgaagcttcagatggggaagacgatgacgaaggccccaacggcgaaggccccaacggcgcaccactgacacgctcaacgagtatcgatggtgatagctcgtctatggacagtctcgccatctctaagggaccgggctccatcgaactgcgcctccagccgacactgtcacttttagatgagaccaagccgccgcgtcatcgctcaggccatctgaagggtctgatgatgacacctatccaccaagatagtaatcgactgggtgtctcggagaccgcgcgcaaaacgggccgtccctctacaactggtggtctccgcaagaagaagtctgctgatagtctgcgcatgttgactaaacatcccaccgaaagatccatgtctagccacagtgctagcgaagacagtcgcaagaagttcggaataggtaaagggaccaacaagggcggcaaatccaaagagcaaaccgatgacctgacccaaatgatctcccgcgcctccaacttcatgactctcgcacatgtgaaggtgaatgacgtagttctttgtctgagctacaagggcagaggcgagcacaatctagaggatctccacgatttcgtcttccgccttccagttctcgagtatagtaacaagacatggtcgaacctggatcttgccttgcgcctcaagaaagacgtgattaaagccctcatctcgcacgcgcccgccattcttggcaacaagttctcccaccaccgaccttcgaagcagcaacagaagcgtttccgtgagcttgcatcctcgtctcaactcctgccagacacattcagcttgatgaaacagaacaatgatcaagcccatagtctggccagctacgactctaatagcgattactcggagtcccgctcgcgcagatccatgcagtcgaatgcctcgccattggctaggacgacctcgttgaattcagatccccacggcacagattattcagatcccaccatccatgactcgcggtccgctagtgatgtggatgtggattctcgctgggaggttcgtgttctttcgtctcaccgtgtcaccgtgaatatccccgaatgctaatacagaatgtttaggcgtcgcgtcgatttgtcaatgcccctccacccgaaaggccgatgacatccggtaacaccgtgactacgatacgatctggcaagaatgatcaggatgataggtatgaatcccacccccgagtccgtttatcgccgtggcgaagaaaccgactgactcgtctagtcacatcaaaacaattcgcaacatcggccggaagctgacattccggaaatgatcgctttgcttcatctactatatcccttcttttctcttttcgttcctatttgacctaatacctctacacccttttaaaatcctgtgatcctttgtacactaccatcgctttattcccaccagacccctcgtgtctcctagataccctctacctgcatcgggccgtacataggtgactgtacataacatatttcctctgccgggtggggctttcctatcttagctgccgccgcttttacgagggctcagatacaccacggggtaaagccgtgaggttctgtgttccctaacgaatgttagggcctgatatatagaaccgctgaaatcaaatagacgttctgtttgtccttacgatcttttggcctgactagttagttatctagttatgtcacgtaatatagcttagttgttaaagttatagactaggtactcggcttaccgagaacggtagtctgtaggtaactttgtgttcaaccgaagacacaatatatagagctgctatcgaatcaaattgtaaggcaaattatagttttattacaataacccagccattgttaccaaggaatacagttgaagtagcgcgttgcataagcttccagtgtactgccatgtatttggtggcaagtgattctgagcgcaccccactcctgaggctccagatattcacaaatatgagacaatatctctggaggcaggtttgtgatagacattttgaatgaatagtcacgtgaacggttagggatggggttggaaaggggtttcggctcagaacattggaatcatatgagtttaagtaatcaaaggttagctctaactaaaaaaaaaccttaagagaccctccagggctacaacttcgcttatagtgacgtgagttcaccgtgtttctaatactaaagaaaggagaactgatttctgcgctgatacattactctgtatccaacgtattgtgacggttgccagtctactaaagatcagttgtgtcaagacctcagtactaagaaggctgatgcctgaagtatgacaccctgttatggtgcgtgggtcatgtgtcccacaacctttatattatcctcgcatgctgcttctttggagaagcagctattagttccactatgccactgcgtatattaggtgcgaggtcactgtacaacggcggatcctccagctctaggtgccagccatctggctcttccaccttgatcccctttgactcatacccaggtaagacctttggcgaggtctcaacagttggcaatggccagactgtggcgtcgtttgggtcgactctcatgatcaaggctagcgcgaaccataccctctcactgaggggtgcggttccatggtctagagacctcggggcgtctcacgtatgattacgtatctgctacctccagcaagatcgagaacgaggtttatcgtcatcggccagaatatcaatggcttctatggtaagtactggacgaagataaaacaaaaaacccgccgagtgaaggggtatttaccaatagtgaacatcaccctaataaggagaaagtaggacttacccatcaataattacatgagacaacctcatgctgctaccttcgacgttatagaaaaaatatgatcggaggatatctagcaacggcatctcccgaggccgagagaccctggttgatccttcagcggcaagtggatggagccttgtctcagaatatcgcgcatattttaccacaaaagtgaggagaaggatggcccccatcagctagagaccctgttccgtctcgggtgcaaacagaccctggtcaggaagactcatatggcccccattttcagaaaattggacctggcccctaaaattcaatccaggatgcttgttccaggagagaatagctgggtcaggccgccgatgattgcaagcattgctacccataggcatgtagctagactaactttaaattagatgattataagaaggatcccctctccccgtcgatatttttgaatctcacagcattttccctcagtattctactggaaatactagatgtaattcttcttacacgctcttttacttattcatgtttatcaactgaccgctgtagctggaatcagtaatcgtcaataggaacttctacctcggttgctctttttgacttgctaccaggtattttcatggaatttatactacaaaggcttggaagtatatatgctgagtccacaatatagataatcaagtcgcctctagactctcaaaactacctataaaatccatctacccctccctcgtgcacttcttgtgcttcttgaccaccatggttgaaggtctcacccggtaccagatcacgcccccgagcgacgccattgtcgtccccgacagacaatccatgaacgatctggtcaagctgaatccggaaacaattcttcacgccgagaatggaggctattatctcaagaacatggacgaagaggtcgttgccatcgctggggatgacctatgcacagagttcgacgccgtgtttgccagtattgatgctgatgtcgtcggtgacggctctagatctggggatgagggatctggatctctgggcggggcaaatgttacgaagaggaatgaggatctcgcgttacccgaactgtatgcaaaatttctgcagccacccccgttgcttccactctgccacctgtctgagctactcgtattgccatatatgctcctcaagcagccggaaagtttgtgtctagagtgtagtgttatttaagacaatattagagagcctgtacggaggtctgaaagggtgtggcacgggcagtgaggctggaagaggaacacgagtgagaatatagcatctgccacatctatcaatatcctattattcgctctgcagataattgtcttttgtcttcatagatgaaatgagtattgtttgccaatttcaggtactctgatcaactcatactatcgtattccactatattctttactaatttaatgagtgctataccttgaataggtcaagatatagttaaatttagttcctcttttgattctttcagtaccttcattttaagcttgatactcgtttcctgctgggacaggtggctatgatagcgcttccttgtacatgtacacactagttagtggcttccccttacccatgatatagatagattttgtttagcacctcttcatttatgaatatgtaccaaggctgacgtcgtagggtaatttaatctctgaatatctccactggtcggtaatggctttacagcgggggaaattagttgcccagtctagtctctttcatacactttgtagtgtttatacgacgaagtatgtcttgcgtgaagttaatagtagaggagggtataatgtacgatccctaggactttagtgggaagtctagatgtatataaaataataaacaatatcttagggtcttaattctcccagagaataaacagagggtatctatatacaacatcattagcctgcgcagcaaaacaaaatccaaagaatgtcaagtctataagccctctccccaatgcatttgcatgagcaagcaaaaagaccaaaatgagaaatcttcattggaacaaacaaattcatcagtcatacatattacacggataatttctccgtagatggttcggcattggaagaggagccaagagttgctccatcataagttccatcggtgacgtgagacgcctcattaggggaatttctggaggcatcgttagagacatcatgggctccattggagactccggggacatcatcggatattttctccacgccttcggatggtgccgagggatggtggtgatgattatcacgagtccagggccagacattagcctggacggactcgaagcgggtacgtgcagtgggcgcgctgatatcgtcaacccaacggatgcctccttgtccacggttttcggcccacgcctgcttctcacgacgcaggtcactcttaacccagggaattgtgatcaaggtccacacaatagcccaggcaaacggaagggaccagcccaactttacgtaaggttagtctgattgtaatttgagattaaaagaattccggcttaccgtaaacgcaacgttttcctggacagtgaaaacaatggcggtaatggcggcagcgcagatgatggaccctccactccagaaacagttcatttcaaagagcatacggcgaaaataaggactcgataggtatcgaattcggagcgcatatcgatacatctgtccaccacctccgtcaactgctaccacgtcctcaataagcgcgtacaatgcagttggcataacagagcctttgggcgtggaagaaattcggaatggagccttgaagcccatcatacggaaaatgtcgagggaaaggtagacgatgccgaagtagaacatgacggttggtaggaccatggcgatgaggcgtactgtttaagcagtcagtatgaggcaattgcgtaagatattatgattggttggtctaaccatatggttcttcaggtaccgatccactgtgaacttgttagctcattgttcatgctgcttccatgatatatgctagacttacacgatcaattcgacggccagaatcaaccacacgatggtgaagttgatttggaagaaatccagctaacaagaggtatcagttaatggtccatgatcaatcccaggtcaaaacctacccatgatacgcgggagttcaggggccgggcgcgtgagcttttgcggaataaattatgaaggcggtagaagtattcgaagaccgagactcctccaagcgatgcggtaacgatcgagaagactgcacatcaaaattagcaacctggacgggcgtatttgttccaccgcgcaagacataccgatgttgggcgatagatcggtgaggtaccaaagacaccaatacagaatcaacggctgagccaaggtatcgatcacgaaaatagtccagaagaacgcaatggacttcttccttgtgtgcaacgagtacgggagcggagggggctcggagggtgttgggacggctccttcttccatcggggtggcgatagtggcggattaccgttgttgataggttcggggaaagcgcgataaaggtttgatgaagtattaagggggttattaggacatggtgcgaatgtgatgatgactccgaatgggtttccagagagaaataatccaagaaaatgaagtgaagaagaggcgaatatgtaaattgaacgcccaggaaattttggccggaaacaacggggccaggtacttccgttgccatactatttggctgggaggacaggtacctgacgtaagactccatgatgtcattcaaaacacagccctgatcaaaccacctgctaactatgtgggcatattttatgcatatatcccttggcgaattgattttgcctcttatttgtctggggcttgaggatactaatatcgaatatggcttatccaatagtcctctatggatatagtataaggcaaaccaaaggggaattaggacgacgtcaggtagttatgcaatagacatgaattcataggtatgagtcagcgaagactaaatatgcacaaatcggcagaaaacaaggaatcgagacctaaaaccgacctcgggaggcataacggataccgattccgacatggctgggcccgacctcgggagtttacgttggagcttgttcataactgccccagtcatacggagtactcggtacaaaggagatatctcgtatgttctacagcatactatggggtaaatacggagtagttatacatcattaattgttatacatcaattaatctactctacctataatggacaatgtactccgtaatcagcagagacctgaacattggttgcacgtaggatattcttctgcaatatattttagataagtcaaaggatatcatgaaatctctccaatagcagtgaatttattattgttcatataaaatagaccccggatcattcttgatgccttacaaacaaggcacccacattgagaaagataaggtcatgtgacatgacaatcgcactgcaaaatttggaagctcggcgttcgaatccccccccttcaaaaatttctacccttctttaattttccgacacccatcacctttctagtactgtttttacttccctctttctatccagaaaaaagacatgtagccatgcctggcgtacaacatcttatcgacttcgtgctgaacgaagtcgcgctctgcggtaatcaaggtgtgtatagtctcttcactgggacccacttttcatgcatatggattttcaatgtcaccggaattatgtgaaagcgccctagtatgggatatatgttgaactcctacttcactctcctctcgggactttcgcatgatggatttgagtttgcattcttgtggcgcggacccaatgccgatttacatcctacatctcaagccttgattggcgcttttattcttatatacacttcgatgaatcgaatgctaacagacatcaaggtgcaacattatctgatctactgcaagccattgatgatttccatacacaatctcaggatgtgatggaaaaccagaacattgaccatcgtttcaaagccaaagtctggtcctggctcacgactaacccagaggtgtctattggccagcacaatgaatggaaccatctcaccttaagtgaagccgagaagcttgactcgcgaataagggagaaagatgatgccgatagcaattctttggagcccaaccaaaccgcagagaatccggatttaccaccgcttcgaatctttgtctccgaagagagagcctgggttgccatcactggccatccaccagatgagtccaaggtactgccccttgaatttgccttactgtcggtgattgcttcgcgcaagtcaaagggtattgtgcagccggacctggtgaggctcagtggccaggataaacggtctgttccgaagcgtaccgatgctttgcaaagaaaaggatacatcgacaagcgacctgttcaaacaaaaacggccagaaccagcctctgcacgctgcagcggttctaccgccacactattagcgatcaaacaaagtcagaaccgcaatcggagaacatgattgatttcgacagctttaacaccagcctgttcaacattctccgagagcacccgctgattgcacgcaatgatttgaaacgactcctcggctttgatgaccattggcgttggaaggtcttgtcccgtgccctccgcaagtgggagcggataggcgtggtacagcgtgtgagagccgaatcgcaatacgaaagaatgcatccttgtgtgaagcttttacgggatcccacagggcaagatctggaacttttccatgaattcaatttcgatgtcttgaacaagcatggggtgcgagccaaaggaactaaacctaccccggaccaagaagaccgagaattgcagctggggggccaaaccaaaagatcgcctagtctggaggacagtggggttgatatgatcaaagagcatgttggagatgctgtacgtatcgtaccgtcttggacgccggatcgtaacctcaacaaccaaatctttgacatcgttcaaggaacaggtacaacaggcatcacgaaccaggtaagtaccttactcgcgaaagtgaagatattcttagctgacaaaataatccagaccttaaacttgacttgctttgggtcctttttcaagagacccgctgaaagtatggtgcatcgcttggtcgacctatggcaagtggcccagccacttcatctccgccattacgccattgttcgagatatggcaatgaaaaagaccatcatgttttatgtccactattcgctaaacaacttcgcaaagctagttgaagctggccaggcatcatgggaggccgttgagattccagccaagaaagccaaatcgctaaagatccaggcacctccctttggtgctcttcctcagcttgatgagcatggattcctcaaaaaggaattcccaaagaatatgttgaaggatccaaattcaactctactcgacgggatcacggctgtcaaaccgcccaactatcttctttcttcgagcgatccttttgttgttcaactttcaaacggtcaatatggtacgattgccccttcctctccttggatttcataagagaaattaccgtgaatctaacattaagccgcagtgatccgcacacgaactgataaactcccccctggctccaagcaacagtatgagccccgtttccggcccaagggacgaccgaaaggcagattgaaccgcgcgactgtcgaaaagcgtgccagagaatccaaagccaaagaccccatagccatagagtctggagctggagaacccgacgctagccaatccgaacccagagaatctcaagccgtggaatcccaagttaagccggagccaagccagggttatagctgggaatatgtcgaagaatccccgcgagccaagagagccaagataaagcacgacagccttagagggttatcaaagaaagagaagtttgaagcacttggtatggatgagagttggactgaatacaacgctcttgtcatggaaaagcctgctcctggtgtgtatgtgactccccacggccgaagaagaccagccggcaaggcccgaggtcgcccgagacagagccgaattgcgatcttcaaatcgccacagctagcatcgatgccttggtttgtcaaggacgaagatgattcaagtgaagacgacaaggtaggggatgatgctaccactactcgggcatccgagagccttgcccctgaagctgcacattcagtcatcaactccgaggggcctgcaatgacccccactccgacaacttcaaggcgagccaagagaactctgcccaatgagccagcggcctcaccgacaaaatcctcgagttcccaagccaatgagcagagaaccgggagacctgccaaacgatctcgtcttcgcaaggcccaaaacgaaaacaacgaagaaccttcgaaggacgctaacgagatattgcccgaggttgtagttccagcactccaagagggttcaatcaaagcgagtacaccacgccatcgtgacaagagtgccagcgctcgtatactcgaggacgaacaagctggaactccctcaaagcgacgccgtgtggcatcctccgaccgcgcgactttacaatccccaacacctcgtccatctgatgtcccgacaccacgattgggctcagtggtcccccagaaattcaattttagcgccaatggcaccaaacctaccagaaagccacgtgttcggaacagaactaacatcagaaacatgctaattccagaggaggaagaatcgggatcctctaagcctttgattgggagaggcggatctatcagtgtccttcggagaaagctcatcatggaaattatggaaaaggctgatggtgtatatcctgcgggcactgcaatgtggtatccttttgtcactgcatggatgaagtttcatcccaaggaaaaaccagacatgcgaactatcaatactgcgtgcaagcaactgattgatgccggccagcttcggcagctaactttcagcggccgagacacgagaaaagtgatggtaacaaggacgttgttgttgaagcctgatatctcaccagacgatccgttggtgaaagagatgcagaaaaagattctggctactgatttccacgagtcgcgacccttcttttcggccaatgtcgagctggatccaaatttgacaagaaatagtggtcgaccacacggtgcacctccccgcacgcagagattctcattcccggtagaagaaggaacccatgttcacttacaacaaaagcctatttccattgtgaacttagaggcaagaaggaggagacaggcccagacgaatttcattaaacgtctggaagccaaagccaaagctgccaaggctgccgaagaagcggatgaactgcctgacctgcctggagttcagcgactcatgacactcgcacgccctcctcaattggaccttgattctcatccgcacacatcaattattcgtccatatatccgaacaggtacacgtggtcctggcaagcaccaaaagtctatcatacatcccaagcgggtgatgaaaccaatttccgccatcggagcgtatgccatgttgatgaatccggtgcaacagtttgacccggctagtggaactttctctacggggtcgtgctcggccagacgccgaagaaagccaatggcagcaaaacagccggttttgaacattgagaaatctgtcgacgagttatctagactggcttgcgacgaagcagactcggaaatccctagtgctgtcaaagcgaaaattccactgtcaacattcacccaaaagaccaaaaagatcctcaaatgggagcttcatcatccaaatctctttgaagcgaaccttgaaggccagcagtttatcaaccaaactgttcaagatgctttcaagccagcgccggtcacaggcggtatttgcttcgacatggatatacctcctccaaaacagcttcaagtgcctgaaatacctgaagtgcctcaagtggaaccagatttgccagcacggcgtagcgaggtccgtcgccagcgtcagtctctacctgaacctctgccccagcctcctataaagactactccgataaccgagacacaaaaacggacacccaaaccaagaagaacacgggctcctcgggccccgcgtgctcctgttacagatcgccgtctggccaaacttgatgatactgcaacagccgacaaagaagcacagtcggcgaccaccaaacgcattcgccgacagcgatttgtgcgccctatatccgaggatctcaaacaaaagatagtgattgctcttgtcgtcgttcgtgtgcttgcaggcggagcggaatcaagagtgatcgattggcctcttgtgacaaaagctttcccagatcaagattcgtcttttatcgaagggcgagcgcgtcagatactcaacaagaatcgcttacagattacgaagatgcatcgtgatttccaggagtgcttccttgaggcttatgaaaaggacgaagttccgcccattgactattccgacttggacagctatgactggcctgccctgattgaatgggcaagcactaggctcgatgtttctccgtcggaacgggctccggacctcccagcaacacggcaacaattcgacagtgttttcgaactacgcgaggatgctattacggcaggcgacgaactgtatcaggctgtgcatggtgtcactataaaccacaagcgcaacctaatggcgcgcaatccattcgctgtacccgtggatggtgagacacgcgcccagccggtttcacgaaaagttggtacagcacaacttgaggctgcgaagacatgggttcgtgcaaatatcgtcaccgcagaagagacctaccgacccaatgagtcgagcgatattctgcagcgctttggtgatcgacttgtcaccactgcgacgcaggcactactcaatgaacgtgtcatcagctcaacaacccgtggccgcatcactccgggtcgcaactatgatatctcggaatatttcctgcagacactgagccgcaagcgtgccgtcgaaagcagccagctgcgccgtgccgctcatttcaagtcaaagatgctagatcttcaattccgaactaccggtgcatccgacgtggagtacaccgcagaagatggcgatatcctcgcattgatcaatctctacgcttcgggtgctattcaactacgaccccgcgatgcccctcgcgccaagttcggcctcaccgatggcggctatgaaacgcgccaggtggacaagaaacgattccgtttccctatcgagattactcccaccgcaacataccgctacggcaaccccgtccatggcaaggctgcagccgcgtaccttccacccgcgccttcaccatcaggcccggaaatgccacctaggaaccccctttggtacgacatcaatggagagttcatacatcgtctctgggatctggttattggccctgttctcgggtgcctggtgatgcggcctggcatcaaggctgccaacatttctaacatgatcaagcccaccatgggcgcatgggaaactgtgttgatgctgcaatggctcgaggaagttggcattgtcaagccagatggcgagggagacatggcttgctggagattacaggagtcttggtggatgattctatcttgattgcccatcctcgtgaactacttatcttgaatgtaacattatgtgaacaatgcttgctagccatacttctcaaaaagtcaagaaaaatacaaaagaacaaggatatgggtgcttgatttcaaaaactatctagaggtatattatagatcaactccggtaatgtaatcccaaacgcctaaatagccagcgaaagaaagtaatgctcaacatcaaccccatattcgtttacagatcgtcgacgttcgccactcggcgcaatatcaacaagataagagcaacgatcaccccaatgatagcccggtccagccagatactttcagatggagactccgtcgaagccaattgagacgagcttgtctgtgtatgcatagcagctgcagccggtgcttgtacagcaggcagtggtgcctgtgcctgtacctgtgcctgtgtttgtgccgcgggcaccgatgtagacgcagaaggagccggaacaggttccgcagcccgagtactctctatagcatcatctccccgagcctggtgctcattcccaacagttatagagtccccactcgaagccggagccagagcaccagtatcagcatcagcctcggcctcggcctcgaccgtctcccgttggccctcgacaccagaacacccgtccacagccgcaacctcaccctcaacctcgaccccacgctcccgacaaaccttccataattccctcatagcctctagattctcagccccgcattcacgacaagtccacccaagcgaaagccgcgcatactccctccgcagctcctcactcccctccatgcccccaacctggccctgactctccgaactgaagatctcagagcggatgcccagcaatgcagtgcgcacgccccaagccggctgccatgtctcctcgtggtggccggaaatgctgaggcagatttcgcggttgacttcgaagcggccggagggcgtgaggaagcggaaagaggggggacggagtgggtatgtggctgggaaggtgatacggccgtggtagaggccttgagcgtagggggaaggggaggggggtccggctagggtgaagtgccagtcgtggaggtttgtgtcgtttattggggcggctgtgaagtatggacttgggtttttgtggaggtcgctgctttctttcaggaggcggcgggttgagggggaggacattttggtctttgtgtctttggataggattagatttcgagtcgaggatgttctaaggttgaattggacatgttgggaggaagaaagagcgataagacaaaaagataaagatgacagctgtcccgggtttgcgggggaatgatgctattgggccgtggcaacgttgttacggacgacaatataggattcggaatgattagggcatatcttacagtaataaacattgtacaataggaattaaggtctaatggacatgaaagccttaatatgaggcatccataccaaggctgcgcatacgctttgtagatgccataaacacaacgccttcaacatgctacttaaaaatgctacaaacaatcacttgttcttagtcccaggcccgccattcatcatgatcacggcgtgtgggttgctggcggccagcgcccggatccaataacccatcgtcctccacgtcatccccataatcactatcgccaggccgcggccgcggtgatcgaggtgcaagagtctgcatcgacaccgacgtcggaggtcgatcaggcaggccaccgcggcttgtcacccgctgctgtggaccgcctcccatccaactattactgttgtctagattgcgctggtacaactcacggtagtactgctgctcctcggtggattcctgttctcggcgctgtcgcatgcggtcccgcgcttctaggaatttagcactaggctcccagtgccagccatcgccagtagttgtgcagatgggcacagcccagagcagcggccggtccccgaaaaggtggagcaggttacaccgccagccgtggtcaaacgcgctgggcattttttcgttgtcttcgtcgttttgatactcctcgtaccgcgagtgctcgcgctgccgttccatttcggcgtatgaccgcgtcaacgcttgttgcgctggcgtgaggccgttccctgagccgtctgggggccctgatgggcgcggcacaggagatatgccctcttcgggccgggtgactcccgggattgcattggcgtgggcatcgataatctgatttccatagtcttgcattcggttggataagctttcctcgcccggctcgccccaatagttattgttgggcgccggttcattccgctgtctgtatagcgctttgcgcaaaggcgacacatatcgggtcctttccaaacattcaatggtagtggtaccccgtatagctagactgatatgccaggctgtaaatccacccaaaaccaatccaatgatgccacccaggatagccagcagaactacattgaccggaagaatagtatccatgtactgggtatcgtttaggatctcggtccagacccagacggctgaaatggcaaaaacaacccaacagaatatcgaggtgtagatcaaaaatagcaagaatgccttataattatgcagcccaacacatgttgccagccagggacaatggtggtccatcttgaggacacatcgtctgcatgtcgagcagtggtgcgcgcggtccggcttcggacactggcattttttgcagtatcgtgattcacctgtcgaggtgacggtatacgatgtgaactccgggtcttcggagggagggagggcgctgtactcatgacggtcggtcccgcgactagtagaagtcggtgaccccggatcagtgaaaacagcgacggtatatgagaaattgaggagggcgtagagggaaaatgcgaggatggaactcgggatacctaccgatatgttagtacacccggatacatagccccgttcgagtccgagcgatatcctgcatacctatccagtcactccgtgacggtttgatgccgatgctgacagcgacgtatactgcccatgtggtgaggccgtagacgaaggcgagtggaaagcaggttgctgctgcacagcagtaccgttcgcagcggagagcccaggctcgagggcgtcgtttcggccacgagggcgaggtcgggggtgacgaggccaaggtggccatgactgagatttatgacacaagggaaagaagattatgcattaaggattttgacgggatcggtcccattataggcaaagcattgaagataagacaagtctcaggaaccgtacctacaatacatatgcgatggaaacgaggctatcaggtgagatgtacggtaaggtaaaccgggtacggtaattttgacatgctccgccacggccccagccacaagaagtgcgtacaacatacgtgggggacacgaagtatcgtcataacaatgttctatttacggcgttgaagcatattttcaggaacagggaaggcatagggaatattatcaaataatcataggacactactttatatactcgtatgcatgttggggtaattggtgatatatcaatatttacagtcataattctaatagattcatcacggctctgccttgaaatgcaatgcggattgttctcgaacgtaaaaaaaaaggccgaatcagctgctggtcgcattggaggtcggcaggttgttctgtgtacaccagccattgacgggcagacaactcaaccgatagcaccaagagcagttcgaggaggggtatttataaaaatcgataagcaacataatgaaaccaatgaggaccgcgactagggcgccagcacgaaccaaccaccacagccaccaaagagccttgcggcccttgaagaaaccgagcgggccgcctgtaggaccggggttttctgatgagtgggaggtgagaccccgcttgctcttgaagaactccatgaaggggatagtcttttgctcgggaccagcttggccagctccgccgctcatggcaacatatggctgtcgtgccagaccaatccgctcgcggagagcgttaggcgaccgcatgatagtcaggccaatggcgagacccatgataaagccaccaatgtgggagaagttgtccaatcctgggagaagaccaagaacgaacgagacacccactccgagaagcatgatgataagctcaacccacggagattcgcgctggggccagtcatacagcaggtcgagaagataaagcgcaaggataccgaatagggcgcccgagcagccatcactaggatcgagctgcgcggcgtagtttccacccaaaacgaacccgaagataccactggcgaagtaggtcaaggtatagcgccacatgccgaccatacgctccatgtctgcacccatagtcatctgaaccaacaggttgaatccgatgtggatgaatcctccatgcatgaagatggggataatgaatctgtaccactggttgggagccggccgatcgtctgttgaccctccaatagaggggttgggaacaccgctaaagccgcacacttcagacagtgtacaacccgttcccgtcaccgttgtcgatgtggcattcggacagagccacgaaagggtataattggcatcttggattccctcaacgttcttcatgcacgggttgtagcgtgctcccatgtatatttggacgtatggtgagggcccgatcatcggattgaaggtaggttttgtctcgatcactgaccctgtcaactgagctggagcggaaaagaatttcgttagttagtccgaaatgtgggaatcgactgagctaggaacagaactcaccattcttgaccagttcgataatgaatacgatgatctgggctaatgtcaagatgtatgtcacccaggcaatcttcttgctgaaaaatcccttcttctttcggccgtcacgttgtcggctatcctccagaccccctggtgatggagggtactgcgtctgttggcgcatccaatctggattgtttccatactgggcattggtcttcagaggtatattttctgcgtaattatcgccttccgttgcgcgcccggctgtctggtaatgtccattgtccgatgcaaatgactgttgactctctcggttgtgataaggggctgagggatcgtcgtgattgtaaactggggttgcgtagccgagtccaggagctgtgtgcggggcgttatctgtctttccggggacagcttggtcgtagctggggggttgtgggatatttgcgtgatagtattcgttggaggccatggtgcctggggttgagtctttgttttagagttcgggagcaaaaaggcgaacccgtgaacccgttaagatggttatagagagcttaagtggtgaagagtatatataacaaagagcaacccagatgaaagaaaggtaaagtcaggcagtcgcattattcgcgaagttatttttgggcggatctacgcaatcccagcaatgccacagccgcgtggctggggcttttccaccgaggattttccactccgccctagcggacctggttattggttacttttccatagggctgctaacgaaggggcgacaaaattgcgtcgtatctgactaatttatacttgctcttttctataaagataatctcgaataaattcccaaggtcccaaggttgtgcctgatccttacattccggcttacgtaatacacagtaaacagcctgccaaggctcctaattgggattagtgccctagatgtgaaaccttgttttcccagagtgggggctcaggccgtccacgtgatgagaagcctttttagtcaaaattgtgcccagaagagcttaggcgttctataaaaatatccaaggttgtagcgactcaactgttttggaagcctctgtagcaaagaaggtctgctctcggtcaattctttgattttaatgaggtgtgactgtataacttatggacaattctgctagagaaaccggtaccccacaagatgatactccaagatggagcggagctaaaacgtcacctctagggaggatattgtttaatgtggggagaaaatctgcgtagactactaacgattattaggtttctgtcaaagagcaaggtaaataaagcaataaggtcattatgatatgtagagtatagaggttctcctttcttttagctttctttccttgaagataatgtaaatgctaactagctagcagagagaatctaattgatcaaatgcggtatttaatactagctcaattatacgaaggggttgaagtgaaaactctgcagattagcacaaacctacaatttaattttgatctctttgatctatcactatcaatttagatagctctcatagtgacctctgaattcatggggttgtaagtcatgtgaacgatattaagaatacctaactagacatacctaaagtagtttagcggggactgtaacaatattgcgtcggtagcccttcttttcctctttcctctttcctctttccacctcctgcttcattgttgccgctatgacagcagcacaccagagcgagactgaagataggtttcttctcctgcgcttccttgcaaacattgagatcccagagacgatcaccaaccatgtctacataaccaaccttcaatccccgatctcgcgactgagagatcttcgttcaaatcgaagtcagctccaacaacacctgagcgccagtttgttacctttgtcaatgtcggaataccacaatcaacagcttcgagatcagcacaacctagattcaccagtgtgacatataaatctcgcatgcgttggctctaaacgaagactttatcttgcaactcgtgaaaataagacgtatttgcgaactcactatcggtggtcagattgactctgcaccgacatatgtagcgtcagaccaatacatcatctttatcagagaggcgttttagaatcgaaagttgcgccatttcaattgaacgacaaggtcaagatactagagagtaaatggcaaggctctaaacccctcgaccaagatactatcaacacattcaaagaatgtttactctccaacctctgccggttatcatcccgggctaggggcgaggagtatacacaaaagtcgagttctttctactactgtcgatcagcagtctatcacaatctcagctcactggaccatttctccgaagattcttataacatcttcttttattcctaagtcgtttgtcactgtgtgtatcacgcatacaaaatggagtgaattgtctgaattgtattgaggataagattcctaaatcattggccccgactaccagcaatctctctacttcgtctactcgcaaacccagttctgaatatataatgacagaaacatgcactctccaacttccaccgaattggataaaacaaatagagctccatttgcacgaactctacggtagaaaaggactaaagtgtgtcgaatttcgtacagcgtaatttaccactagaccataacaaaaaccaaggttcctgtttagggcctagaggggccatatcccattcttgacagaaaacattgatgtcggaaggaattgcagacaagatgtgctgataaatttcctcgggttcgtcggataaacttcatgatccagctgttggtttgtgaattctagagcaatcgacctgagtgcaagaagtctcaagagcttgtcctcgggactgagtattcgatctccttctacgcaccttatgtgctcaaatcgaaggtcatcacagtttcgcttgcgagatagtagctggcttaggaacttctggccagcttcctatacccagcttgacaaagtgttcaattaagggtccaggtctatagttcggagatgtgatcggcccgtgtttcttcccaaggttgggattctgccgctgatgtcatcgccatgtttcatcttccccgcgcctgcgacatctaatagtcaacaccatcaccatggacgaccctcttatccaagcattgcctccggctacggactacctgacttatcttactctgctagaatatcagttaacccccaaacgtctgccacttttgcacaccctcctgcaagatgagaagcttacgacgaacatcggctgggacttggtcaagctgctgctgcccatgctaccagcgtccacagaatgcctacaggatgtggctcgcctaggcaatccccgagaagtgatcttgcgcgtctctgagtctttgatgcaacttcagccggaggacgcggacgaggatgaaaaggctggtcagggactgcccttgcacatcctacaattcaattgtcttctcggcatgctttcggtacttcacacacggatccagacaaaagcgccaagtcggttcatagcaacctccctccaagcagcactggaagcgtatgccacaatggtgaccaatgagaccaccctcgccttcctcgagttcttccgcgaagtgtccccctccaagcggcctgcaccaccccccagaactgctagcgagtcgagcgtcctgaaagttgccgctgcctccgcaccagaccccgaagctgaggtatccacgccctctccctctaccgataacgaaaccctccttgttcggaagttcattcagttcggtttgcttgaactgctgaagtcatatcttttgagcttctccagtccaatggacccgggaatgtcgtggaccattcgcatgcaggaacacctgcatccggatctgcggctacccggcaccaaatcgcagaccgatgcatatggatcgaccaaggagctcaaggagcgcgatatggtgatgggaaaacttatggtaagcaagatattatgaccggcattatatcaaattggaggacgatttatctgactttgcttctgcttaggctctatcgcgagacgttggaattgataacgaggaactcttgtcaatcatatccggacccccgacagatcagactgctccacttgatttcgatgaaccaccaataaaccccaaccagattccgctagaacgccatggttcactcctactactagcggctcgagctgcaggcgcaactctctttacctctgggcaaccgctccgtcaggtatccgttttccctgagctgagtcagatatttaacaactttgtcggcggccacaccaatctcgacgaagtggctttcggtcaaccccatgcgcttctcgactccctgctggctttgactgtctacgcactgcaaacccccatcgaattcccgtcaagcgataccgagtttaaggatttcgttatcatcttgactgcatgcacatcacgtcagagccacggcatagttcgccagatcccagctgccattgtccagagccatccgtcagctgagacgcgatttaagctcatatacaagatcttggaagatgaccatcttgcctcggcgcgggatagcgccatcgcatggctgaaggatgaaatactccgcagtccccaatctgccgacaatatattccaggatcctctctacttctgggctctactgccggctcttttcaaaccggtcactgccgccagctcatcatccgatctcgttgctagctggtctcgtctaacccaaattcaaggcccaccacttcattctgcgttgaatctgtattacttgctgctttcctcgccatcgctacgtgaccggctccagctcgacaagacttctaagttcttccgtaaccatgtcctgaaccctctcaggcaagtgttccagagcttcgaggacgatctcaccgccaaaggaggcgagggtgttattgaagctgcggtgggcgaggagatgtgccagattggcaatgcacggtctatcggacttattggtcttacactagatcaaatcgaggagacatccagcgatgcatttggttccgatgaaggcgatctgggcgaattttccgaggctgaagaggctaaggtgtctgaaatccggaagaaggtggatatctgggaataagtacagatccaggttccttgtacagaatttagtagatatgatgtttctacgaatgaacgctttcgtcaccttgtatctaaatttaatcagagtattacgtagctgatgattcggtccaacataaggaagcacgaggcttgccccctgtagaccttttcctctcgatacagttgagctacaagaaatatctaaggaagaagattccttgaggcaatgatccattcctgtcaactatcatgaccgattctaactaagaaataaagccttatccacccaagccacccccgaaacaagaaacgaatccgcaccacattgcaaaagagaaacacaatcaaccgactttaaaaaaatatgtaatgtgaatccccggatatagttgaaggaacggaaaagaagttcctttttaaaagaaacgttgtcacccgaatcgtccacgaaaggttcgaaagagcacaacaaatcggagtcggcagtcgtgaagaccatcggaagaaatgagctgtctcgtcgaagaaagaatgaactggacagatagactcgcaaagagtcttcacaaaagcaaaagcaaagctgagaggtcatgtttcgaggggttgatatttttggttgaaaagttgaaaggagtctcaagagtccgcggcgaagattgcgaaaaaaaaatgatgcatttcaatgtctatcatggtgaccaacgaaccaagtcaggccatggcggttgatggaatgttggaattgggcgctctcatggagggtgtttagaagtcagcggctattcacgaagacatgtcagtatataagtcattattggggaaacaaatggtactcacggttcatgacgacgcagccgccaccgggggacttcatgacgacgcagccaccgccaggagaccgcttcatgatgtcgcagccggctccgggggttctagtgaccacgcagccgttgggaatgggagacttcatgacgacacagccaccaccgggggacttcatgacgacgcagccaccgccgggggctattgagatgacatgtcagtatatgaatgtataaaagagatgacgaagcattgcatgctttggaggcaagctactcacatcgcttctggacctgagcacgagacattttcgaagatcgagaagagcttaagaagctgaagattgaaaagattgtaggttgtttaaatgagaatgtgagcgggtggtggaggaaatcattgaaactgggtgtagaagatgatacttatactcgacgagggactatttttcggactatcaatacaatcgagatcctactcaaggagtggaagttaatgcaagagtcacattgagttgctgacttgaatgcattgggcatccatggattgtcgaaggcatagagtcaatctagaatgcatgaggttccgattgtagtggatgcccattgcggggctggttgatattgttctcgggttcatgaatgtaggcgtcgttgcctctggaattggctctttgttttgatagtcagtcagtgcatctatcgggggacgtcgatatggatcgcatcgcttatcctccgaggcgtgtctttcatgaaggaacgccacagagatggccgaggaacccctgttccaggcacgtgtagttagcacattcaacagtctttcatggggtaagaacaatattaagccggggtctcaagtaacaaagaacatttcggagtatgtgtttgatttcgcccaatgaggatggcatcgtgaacaaagaaagcttaggttgaccaatcgccacaatcacatttctcttacgattgttcctcaggaacaatatcatgggccttggcatcagacaaatttgagatcatattgcacggtgttgagtatcgatatcattttcactcagaaacatcaaagagcacatcgctaccaaaataaagaggaagttagacttcgcttgggctaaacaatttagctaatggaaatgtcccaattcgagaataaatgatataagcaatgataacagtcccaaattggcaaatgcaatctccccttaggtgtaaagcggctcggtcacgtcattgagagtcaatcccgacttggcgacgtcttcctcgatcaagaacatcaaaggcatctcaacgagagtacccttgacttggctaagcagctctttgacctgtttcgccccctctgcgccaggcgcaaagtcatcgctcacaacgtggccccattggaatcgcgctggacgtgcagatccttccttgccttcagggcttacctcggtcttgtggaaatagtactcgtagaactccttgtactctgtccagttgcggattgtgtcgtccggaaccgcgtggaataccttccggaagacttcggtgtttgtgtgcgcccgtgagttccaaaggctttgagcagtgtcggcaagcggatcagcaacgatcttgctctcagggcagtcaaagtcgaagttgttgggaacccccacgggctcaaagttcgcgtccggtcgttcatagtcttgcggcggcaaaagtcccaggtgcttccggaacaactggcggcggagagatgaagcaaaacgactggcagtccatggcttaccatccatggtagatgccacaggtgtgaaatcctcgatgatgactgcgatctcagagtcgtgatcacccaattgagaacggtcgttcagatttgcggatccgcaaacaactacacgatcgtcggcgatcatcacctagtgctttggttagaatttaaatcatcgtcgaatttggcgggaaacgaacctttgagtgaacgtaaagctcttcgctcacaaacgcattaatctcggcatcgggatggccatcccacggcactttacgaatatcctctccgttgagcatataacattcgctcacactgtcccaccggcccgaggaagcatgaccgccctgtacctggcgtgcagcctgctggtacttctcaaagggtgcggtagtatcgaaagcactacgggtagtgctcggggcatatccaccagggcccgcagtgttcaaatcgtactccctgcgggcatcctcgtatttgacgccactctgctgttcagctgcagccatgataccaccgttgttaatccgatcgtaattgcgaaggttgtagaaacggatatactccatggggttaaatccttccttggcaatcaacttaatgatacggcgaccaccgcggttgatggagttgtactggaactccataatcgcacgtgttccgagagtagcatcatctcgcaaatcaccggcaaagcagggaacagacgggatgaccacgacaatcttatatttctgaccagcacgggcagcacgtagaattctctccacaattgcggcaccgatctgattttttactggatgctgcgaattaccggtcgcagtgatgaagaactggttctcgatgtagacaaagtgctcactgtttcggatgatggcgcaatatgcgtcggcaattgaatgctcaatctgggtgccattgctccatttcgcacagctgcgaacaatctggcatgacataccccctcggccttgcgacgaggaagggcggccatatgtgaccagtcgatcctggtattggtgaatttgtccggcgagctgaccacgaagggaggtgccgtattgggtcagatcctctcgcaaccgacgaggcgcgaagcctcgatcacgaacaccgaagtggctttcggtcaaccccatgcgcttctcgactccctgctggctttgactgtctacgcactgcaaacccccatcgaattcccgtcaagcgataccgagtttaaggatttcgttatcatcttgactgcatgcacatcacgtcagagccacggcatagttcgccagatcccagctgccattgtccagagccatccgtcagctgagacgcgatttaagctcatatacaagatcttggaagatgaccatcttgcctcggcgcgggatagcgccatcgcatggctgaaggatgaaatactccgcagtccccaatctgccgacaatatattccaggatcctctctacttctgggctctactgccggctcttttcaaaccggtcactgccgccagctcatcatccgatctcgttgctagctggtctcgtctaacccaaattcaaggcccaccacttcattctgcgttgaatctgtattacttgctgctttcctcgccatcgctacgtgaccggctccagctcgacaagacttctaagttcttccgtaaccatgtcctgaaccctctcaggcaagtgttccagagcttcgaggacgatctcaccgccaaaggaggcgagggtgttattgaagctgcggtgggcgaggagatgtgccagattggcaatgcacggtctatcggacttattggtcttacactagatcaaatcgaggagacatccagcgatgcatttggttccgatgaaggcgatctgggcgaattttccgaggctgaagaggctaaggtgtctgaaatccggaagaaggtggatatctgggaataagtacagatccaggttccttgtacagaatttagtagatatgatgtttctacgaatgaacgctttcgtcaccttgtatctaaatttaatcagagtattacgtagctgatgattcggtccaacataaggaagcacgaggcttgccccctgtagaccttttcctctcgatacagttgagctacaagaaatatctaaggaagaagattccttgaggcaatgatccattcctgtcaactatcatgaccgattctaactaagaaataaagccttatccacccaagccacccccgaaacaagaaacgaatccgcaccacattgcaaaagagaaacacaatcaaccgactttaaaaaaatatgtaatgtgaatccccggatatagttgaaggaacggaaaagaagttcctttttaaaagaaacgttgtcacccgaatcgtccacgaaaggttcgaaagagcacaacaaatcggagtcggcagtcgtgaagaccatcggaagaaatgagctgtctcgtcgaagaaagaatgaactggacagatagactcgcaaagagtcttcacaaaagcaaaagcaaagctgagaggtcatgtttcgaggggttgatatttttggttgaaaagttgaaaggagtctcaagagtccgcggcgaagattgcgaaaaaaaaatgatgcatttcaatgtctatcatggtgaccaacgaaccaagtcaggccatggcggttgatggaatgttggaattgggcgctctcatggagggtgtttagaagtcagcggctattcacgaagacatgtcagtatataagtcattattggggaaacaaatggtactcacggttcatgacgacgcagccgccaccgggggacttcatgacgacgcagccaccgccaggagaccgcttcatgatgtcgcagccggctccgggggttctagtgaccacgcagccgttgggaatgggagacttcatgacgacacagccaccaccgggggacttcatgacgacgcagccaccgccgggggctattgagatgacatgtcagtatatgaatgtataaaagagatgacgaagcattgcatgctttggaggcaagctactcacatcgcttctggacctgagcacgagacattttcgaagatcgagaagagcttaagaagctgaagattgaaaagattgtaggttgtttaaatgagaatgtgagcgggtggtggaggaaatcattgaaactgggtgtagaagatgatacttatactcgacgagggactatttttcggactatcaatacaatcgagatcctactcaaggagtggaagttaatgcaagagtcacattgagttgctgacttgaatgcattgggcatccatggattgtcgaaggcatagagtcaatctagaatgcatgaggttccgattgtagtggatgcccattgcggggctggttgatattgttctcgggttcatgaatgtaggcgtcgttgcctctggaattggctctttgttttgatagtcagtcagtgcatctatcgggggacgtcgatatggatcgcatcgcttatcctccgaggcgtgtctttcatgaaggaacgccacagagatggccgaggaacccctgttccaggcacgtgtagttagcacattcaacagtctttcatggggtaagaacaatattaagccggggtctcaagtaacaaagaacatttcggagtatgtgtttgatttcgcccaatgaggatggcatcgtgaacaaagaaagcttaggttgaccaatcgccacaatcacatttctcttacgattgttcctcaggaacaatatcatgggccttggcatcagacaaatttgagatcatattgcacggtgttgagtatcgatatcattttcactcagaaacatcaaagagcacatcgctaccaaaataaagaggaagttagacttcgcttgggctaaacaatttagctaatggaaatgtcccaattcgagaataaatgatataagcaatgataacagtcccaaattggcaaatgcaatctccccttaggtgtaaagcggctcggtcacgtcattgagagtcaatcccgacttggcgacgtcttcctcgatcaagaacatcaaaggcatctcaacgagagtacccttgacttggctaagcagctctttgacctgtttcgccccctctgcgccaggcgcaaagtcatcgctcacaacgtggccccattggaatcgcgctggacgtgcagatccttccttgccttcagggcttacctcggtcttgtggaaatagtactcgtagaactccttgtactctgtccagttgcggattgtgtcgtccggaaccgcgtggaataccttccggaagacttcggtgtttgtgtgcgcccgtgagttccaaaggctttgagcagtgtcggcaagcggatcagcaacgatcttgctctcagggcagtcaaagtcgaagttgttgggaacccccacgggctcaaagttcgcgtccggtcgttcatagtcttgcggcggcaaaagtcccaggtgcttccggaacaactggcggcggagagatgaagcaaaacgactggcagtccatggcttaccatccatggtagatgccacaggtgtgaaatcctcgatgatgactgcgatctcagagtcgtgatcacccaattgagaacggtcgttcagatttgcggatccgcaaacaactacacgatcgtcggcgatcatcacctagtgctttggttagaatttaaatcatcgtcgaatttggcgggaaacgaacctttgagtgaacgtaaagctcttcgctcacaaacgcattaatctcggcatcgggatggccatcccacggcactttacgaatatcctctccgttgagcatataacattcgctcacactgtcccaccggcccgaggaagcatgaccgccctgtacctggcgtgcagcctgctggtacttctcaaagggtgcggtagtatcgaaagcactacgggtagtgctcggggcatatccaccagggcccgcagtgttcaaatcgtactccctgcgggcatcctcgtatttgacgccactctgctgttcagctgcagccatgataccaccgttgttaatccgatcgtaattgcgaaggttgtagaaacggatatactccatggggttaaatccttccttggcaatcaactccatgatactgtgacctccgcggttgatggagttgtactggaactccataatcgcacgtgttccgagagtagcatcatctcgcaaatcaccggcaaagcagggaacagacgggatgaccacgacaatcttatatttctgaccagcacgggcagcacgtagaattctctccacaattgcggcaccgatctgattttttactggatgctgcgaattaccggtcgcagtgatgaagaactggttctcgatgtagacaaagtgctcactgtttcggatgatggcgcaatatgcgtcggcaattgaatgctcaatctgggtgccattgctccatttcgcacagctgcgaacaatctggcatgacataccccctcggccttgcgacgaggaagggcggccatatgtgaccagtcgatcctggtattggtgaatttgtccggcgagctgaccacgaagggaggtgccgtattgggtcagatcctctcgcaaccgacgaggcgcgaagcctcgatcacgatcaccttcatactggtggtagtcatcaattccacgggtgttggagtgggatgcttcctggcctggtgggggtgggtaatagggcgtctgctcctgttgctggccatgatagggctgatacgaggcgtcggcactggattgcgctggtggtggaccaggcggaggaggggggaatgagttcccagtgtagctgtactggcttgcgtcatgaccctgggactgagcggattgcggttgatagcccagaggggtttggcttggcactgggtggtaggttgaagcattctcagcttggtacgagggagacgtgttctgctgctgatattgatgctggtttgaggagatctgagtcggcgatggcgcataacctgaagtgctagcactggtgtgaggctgatatacgccggcaggttcttgatgctgaggctggggttgagattgcgagtgcgactcctgatacgaactcgacgaagtctgacccggtggcggcgggtaggtaggtgatgcgactccactgggcttctcttgccaggacggcacagttgactgaccctgcgtgctcgcctgccccgaggggtacacgttggactgaggctgggtctgagattgcgagtgcggctcctgatacgaagccgacgacgtttgacctggtggcggcgggtatgtagatgatgatgcgacttcactgggcttctgctgccatgatggcacagttgactggccttgtgtgctcgcctgtcccgaggggtacgaggtggactgaggctgagactgggattgcgagtgggattgcgagtgggattgcgagtgcgactgtggctcttgataagaactcgacgacgtctgacctggtggcggtgggtaggtagatgctgatgcgactccactgggcttctgctgccaggatggcgcaggttgctggctttgtgggctcgcctgtcccgaggggtacaagttgggctgtggagaagcagcctgctgttggccagtcgagtaagcgggccttccatggagtgccagtctcgtgtatctagattcattgcgaatcttgtatttcaaatcatagatgaaattccatcgctccacaaagtgacgtcgcaaatcttccacggctgcaccgtgcaggctcacggatatatcagaccatcccatccgagacatggtctttctgtccaactggttattctcccaatggacaacatcttcgaaatcaaggacgcgagaattgttgtagtcctgcccagggaacacagtctggttgacatctgagggatgtagatccgagaggttatgttggtttgtgtcccagcgaccgaagcacaagtccaagccacccatgaatgcaatttgaccatcgatcaggcaaagcttctcgtgatgagcccagtacagaatgacatcatcgcgcattccgtacagtcccttcaatgtgtcctttgacatcttactcaaacttttcgagtcgagtgacaggttctgcaaggttgactcgatgtcagctgtcatctcctggcggtcaggcaggtggtcagggtgacggaagacagagatattggggtgcaaatcttctagggcatgttttgtgtgagaagaagacactgtagggactgttagttggattcttttcaatgttcaagaatcatggacatacgagtgagcgcctgcgtaacctccttgtaaacgatgacattgacgcgcacgccccgctgggctgcagcctgcagcatgcgatccaatcggtactgttcattcttcgccggtggccttctcagataaagttcgggagataaccaccctacattaagttagccgcatgcaatgtaaatccggggaagattgaaactcacagtccagaatccaaatcgactctcgggcgttttccagagcccgcgagacagcccagaaataaccgcatccatccacataccacttggcatcgttatgttcccggacaggggcgaagctatcaaatcgatgctctgtgttggtattgctgggaccatactgggcatacgcctgtggatcgatggtggtaccgatcttctgggcaaattcagaaccaagctcggtcacagtaccttgaagtttctccaagaaaccggacagtttgtcttccttttgaggtttcccatagtagttagggttttgttgctgtccacttgtgctttggctctgatcatatccgtattgcggttcggtctggctctgctgtagagaaacggttagttaatgtaaaaggtggaggagggtgaagcctacgccttgataaccctggttacctgggccggaggatccgtggctcttgtaggtgtcgcggaacttcttgaacgtatcgcctagaccgcgggaaccgtctccggacccacgttccgagccctggtagtagccaccataggccagatcatcctggttggacattttgacggctcaaagtagtttgtagatgcgataagataaagatcgttgaacaaacagaaagaaattcagaagagtcaagaaactaggatgcctgcggagcggggtgcgactgttttaaatcgtatgaaggccccgctacccagcccagccacgatgggaacgtgttggatgtggcggtgtacttgtacgtactcatgagatggcacgattatctttccaagttgggatattgctgtattcctatatataggcaatagaataagtgagactgttagatgtattcttactaaatggcacttatccgagtacaaccgaggatatgtagatatgtcacacacctttccctccgaataatgagctatttgacggcaaaaaaagacaaagaaaacaagaagctatattctgaaacaaggaaaagccctatatcaaacaagaatgagtttcaggttcaaacatgaagccaagtgtacttctgcttttgggaatgcgggcttggcattcggatatccaggaaccccccgaggtccactatgaaccttcataccctcaatggtacggagtacggagtactgcaatgcccacaggccaagtaaaacgaacctctcttgggcgaccccgaaagccagccgaagatgcaaaatccgtgaggccccttcccggcgagtggagatcagaactcggtctcacctctggcacagatacgacgcgcccaggtccgtgaagcgcagcaggcataccgagctcgccaacagtcccagctctcttcactaaaagctcgcgtagagcagctggaagatgtgcttaatcagctgagtcagacggtacatgcattcgataatcaactcatccagcatggatcgcaatggtctcagcctcaacttctccagacagtccagttgctgcgggatgatataatgtcccatttcaagcgtgccgatattcactttcaagagtctacagaggaccaaccctcagaattatcccaggctgttaatgagcaaccccacgcgctggtcgcgtccgaggtgtcagccggcagattaaaagatcacacttcggggtctgacttctggaaattatttttgggctcgtctgctggcataattccgtcgactaatacccagaacctggataaccaatcgaataacttggtttcaattcctgtcgcaccatctattgccgaaacacataccattcaatatgcaaccacgcccttcacccaacggcttttccgcgcttgcgctgaaagtggccatcgattcctgtcgaatctctcatataaagatgaagatatgtgggagtttggactactgctacaaagaatgccacgagcagagatccaacgttatttcggacgtgtcatagacatggaaccgtgcaatcctatcgtcgatggccgattcccatatgtcagcctcggtggtgcaggaacccactttttacaaccttccagtgactccttttcagatagcttcgccctcttccgaatagcaaatggcgtgtctcatgttcctgccgatgaagactggtttgatgtgcatgatgttgagagatacctgctcaacaaaggcattattgcaggcgaatttccttccgcccttacgatatcttatccgtttagtccggatgccaggccttcgaacctagagatccctcaaggcgaattacctggcggtatgatgatggtcatcgacgagtataaattgatcaacagtatggttacactgttgttgttattctcggtgaatataatagaagctaacatagccaggattgagccagcttccagtcgctctgggctgtgtggctggctttcgccggtctgatgtcgagagggtagtatcccacaatgtgaggtggatctcagttggatttactggctcgacagggtaggcatgtgtgcattaatttatttgaacctgcggagtatcacaatttcctatttactttatacacgcaataaatcagacacaatctgtttgtaaccatctacttacccttgtttcgtccaagtcttgcgagttgctgcgacttcttccgttgattatatggccattcgacgccacaattgcaccaccaagtactctagattgagctagagccccagaccatgccggcggaaagatgtccgactcatgacctcctcccgccaataccatacagccgccacagtcgcacccggtccaattgccacggaacctagaatcaaaccagccagtgcgacctgccaagagacattggacactccaatgcggtacagatcccacacgctagccaggcaccacaggagagttgccaccgaaacaagcaggaaatcgttctggaagaacacgaagacaccgtccgcaagtgttgccacctgtgcgaaggcatcggatgggatgaaggcccttgtaataaaacctgtccccaaagcagcccagctcagcaacaaggccacatggaaacaagcagatacaccaccggccacagcgtagagggtttgcaagtgtgggatgtcacggtttggtttgctctccgctgcggagctatcggtcttggccggtgtgcttgaactgatcgatttgatgacacgggagaatatgtgagtcaagataagcacgtataccggagcgggctgccacagcgcaatgaagacctgtcgcgtgttcggggcatcagccaatgggaagaacagcatcatggtaggcacgacgaatcccaaaatcaatgctggcagtatcgctcgagcggtggattcgggaagtgtgcgggtacttggggaaaagtatgctatccccgaagaaacatatgtgcttgatatgaagaagagcggtgcaatcaacccaatccctcgcaactggtatagaaccgcccacaagctcggaatggcaagaagggtccatttgttccttggtcggaaaccttcaaccgtccagatagcgataatcggcatcatcgagcctaggaagtacagaacttgaaatggctgctccggctttgaaaagttggagaccgctggcaggaatattgtcaccatgactttcaaaatgaggtcaacaggtcggattcctgtgtacacctgacgaaggggagcttcggttcctcccgggagttgaaccgactggttctggattgactggcggacgaaccccattgttccatttgctctgattgctgccgacaattgacgatggcctaaccaggctaggaggaagtatgcagcgtacaacaagatgctcaccacaccccgagatgacggtgttctaaagcgctcgtcgaaatatgcaatttctcgaggcctgtgcggcagtggaagcatgtccaatgacactgcaggagcatacgtgtcgatccatttgctgaggacagtagatttggagaagcgtggcaccacgtatcttgctatgaacttcaaaaagggcgtttccaggcactccagacgttgccgggcatgggatactttgatcaatccccatgcacgtttttcacgctgctgttgaacgccctcaaagattttggaaatttctgctgatgacagggtgcctgactggctgtttttcaaggccgcaacgagatgattggtcagggacgcggcggtttccattgcattattgcctccctggcctgtcaacggctcaaactattggacggggatattgttagtcttcgtatgatattttcggagataggtagtctcaccttgtgactggcatcgccgatagtcatagttctctggaaatgccatcttttatagacttattctggcagactgctgtatgccgaggcgattttgctcttatacagagcggaaaattgcagcgtgggagtaatctggtcgtcgaaatgttccgttgcgactgcctcctcctcttccttggtgaatcgagggatatctgcgccatagtacgttttgcccatgttccgcacgagaaaccagtaggtgagatctccgggtccgctgggaacaagatacgagaaatgctcattgaacaccgagttcagcgtgcctttctcgattcccttcactcctttggaaatgccgaagatgcatgcgtaagttgcaggcagatctttcacaatagttagttaacacttctcaagcgcttatgttttgattttcatactagattcctctgtgggatcaaaccatgtgggatctatcttttcggccgctttccacatttcttggcgcactttggaatggattccgtctgctccgaccacgatattcccggtgtaggtctgaccagtcgttgtggtcaccgtgacactcgaagtaccattctcaatactttgaacccgctgagaggtgagcactttggatttatcttggatctttttgtagaggatttctatcaacattcgtcgatcgaggaagacgatcggataaccatgactggaagtgatgtgagttgatgctgttcaatatcggcatatgagagacaaaccttccgattgaaacctcgtcaaggttattgaatgtccagaattgctgtccctgcgaatcacggaagcggagtgtgtcgacagggtattctgccatcttcataaccgactcgtaacaacccagctgatcgagaatgcgaaagccgtttggcaaaactccaaaactggccccgacctggggtgcaatgctgccgtacgcttcaaggatgacaaaatcgatgccattcctctctagcattagggccagcgaaagcccggcaatgctaccacccacaatgacgactttgaagggtttttggttcatgattgatgatcggaggagatttagaatcgaagatgcattgatatcctggaccgcgacttatatatgtcgggcgtaattgttgcaactaacccataatagaaagccgatcgtgtcaaacatctattgaactgcctaaatcggaggaaaaacgtgccgtgatcattgatcaacctgtcagccgggggaattacttgaatgatcaataatcggacccataggagtcaggcggaactaattacggacacggtgatccactatattattccatgattctattggataatcatattgatctacaatgtacggagtacatacggagtagtcgagaagaattaaaaagtacctctacctacaacatacaaagtccattgcatcaccagactgcgcaccggccagtcacagaaatcgtggtgccatggcacacgtattatgccttgtagggctccatcatgctaacaacgccaatcagccttcaaatgccaagcaattactagaataggtagatacatgtacctagtgtaactcacttaatagagtaacctagccgggtgaaaatccagccgtttcaattttcaagactactttgaatatgaaagaaagataattcattgttcagtatctaaatcagggaagtaaaggagaagaactactacattgtcctctttaccagatgattttctttgggcccctcactggatactgttggtctttcatgtgcttccatgctttgtgtctgtaaaattagcccaaccaaacacatttattagaagcctttgagatagaagcattgccttgtactttttgcacaaagctattcaccccccagtttatcagggctcgaatacttaatggacagatgccacagttccgttaacgctgaagagtgggaggaacaatcacagacatggatgcttggagaatctacaaaacctacagaatggagatacaaagagaaagtgtggatgatattctaggtaatcgtatatagaccagagagaaagagggggctatctactacaaaggagatttaactagaggtaattggcgtgcgccgttagcgataatgggacattccagactaattgatgctatgtatttataaaatcttcaccagcaccaaaatgtggactaccaatacagccgcaatccaatgctctccgctaagcaaatctcacagtcgcccgtaagggttataaggtagtatgtccgagtgctgatcaaggtaatcgtgggaatcatcaccactaagtcctcggagattgacaggcgcacttgtaaaaccctgttggccatgtctggatatccaccttgcccaaccaatgataagcacaagcccaagcccaataatgatcacagcgatggaatatcctattacaacggacttggacgcagatgaccaagtaagtccgatgcctccgttgacgatcgcgaggaagatgatgatatgtccaaagtagcgatggataatgccaaacctggtaggtgacttagtctgtttatatacccggtgatgccaaaatcccattccccactgagctagcattgcaagcagaaggataataccaaggatctggtgcgcggagccgtagttttgcgattttgtgaacatcgtgcttaggtaaaagccgattattatgccgacgatcgcaattgctgaagaaagtgtctggttgatccagtgccaccggacacttttcggagcaacacggaggagaacgacgccggctggcatcagaaggatgagagctccacaaaggcacagaccgtgaatgatgctaggccagttgctgtcgtttgtaattgatttgctcagcaccgagccagttgagtttgtatacgacgttggtagtccacccgaaccgccggttgcgcggaccatatccatagtgaagatgcctaggatgtcaaaacaaattagtgtccaggagcccgagtaaataccgttcaagtaagatatcacgaaccatattctgagtgtctctctatgtttgccgtttgagagttactgcgtagcatggcagccgaactaccagttggacctagcccaaaaatccacggctgagacgtggatttcaaatccaatgatccagtctcccactgggtgcagtttgagcacctagcattcacggtcatgacgttatcggagatacctgtaccattgagaatgtccaccttgatcgaagatgaatacacaggttcttgttcaccggaggagagacgagggctgaaggtaatatctaaacaggcgcgtcaggattgtcttctcagaggtatttgggtcacgtcaactcactttccccattggccttggagtagatcacaaacatgagagagtctttcatttcatttccagtcccgaccgcaatccatgaatagtccgtcggcccagacatgtggaagtagagatcggtggagccatcggggatgttgatagcaaaaatgaaattggcctggttctggctaagaggcagattgaaaatgctcgtagtagtcgagtcggacacggcagacgcaagggcaatagagtgaaataaatggcctgttaagagccagtgattctgttagataacatgtgaagcaataccaaaatggctaagcatcgggacctgaccgacctagcaaaatcacgacttcgggccttgtaggcagtcgcatgttggcaattgtaatctccctgtatgtcttggaaaggaattgaaaataccccaaagtgacacagctctaaattgatttcatcttccctctatttgacttcactatatacgtattccccgcttatctatgagtgacatctcgccttaacgtgattggcccggccagcatggtctgggcgttgaaaagggaacttgtcatttcctagggtctttttcagagtggatgcctggcactgccaccgtgatagtggagtttttggcttgtctaactagtataacgtacctattgttgttaggttccaggattaactgttttaactgttgtatgttccattaggggtttccacggataaatagcttatccggtcccacgatttattttaatgcttgtactaacttgtttaggcaatcttcaggtccccacatagccccacttccttgtgctgtcatatacttgtaacatcaaagttacacatacaaatgaggtaacacgtatgattcagcttcaattctttcagatctatgagaatataggtgaaaagtgactattcatcacacaagatgtatttcgtagatgtaaattttgctaggtagacggaaaaagacggaaaaggcttgattgtacaaccttgaatgaaccatagttagacattgccagtttccccgcagtacatctgtctcataacatcatcctcgattgccaagcaaaaatcagtcattcagcaattgaagatcatttacctaaatcaatccatcatgtctctcgcaaccctacatgtgagaatgcccattgtcaacccgcaaccccgctgacctcaatccagaccacagagcactccaatctccccgccgtatccacaattctcttcaaagccaaggcagcccacaagctgagcttcgaggaaattggcgagcacctcggtcgcaatgaagtagccgcagctgccatattctacggacaggccaaggcatcgcccgaagacatcgaaaagctggccgatctgcttttcatcccccagcaggctttggaggatcacctcagcggcttccccgatcgcggtcactccgtcgaaatgccgcccaaggagcccctcatctaccgactgtatgagattgtgcagaattatggttatgcctacaaagcggttctcaatgagaaatttggagatgggattatgagtgctatctcgttctcgacgaaggttgagaaggaggttgatgaggatggtaatgactgggctgttattactcttcgtggaaaatggtaagagtgtcttctctatgtgtgtgaacatcatctgacgaatgaataggttgcccttctctcggttctaggctgaaggtgttcctaggagctattgtattcacatggtttttatgactcccaacaggttactcctccaagttcttacttttctataccatcagtgagagaagtgcaggatggtagaaaaacgatagtcaccattctatcaagaatttagatatatctgacttcaggggaccaagtaaatccatctgagacagctcattgatgtatatgtagaaacctgtgttcagagttcatgtgtgtagagttacttaggagttagtaggaagcgttcagacagtgttatgttggttcgacctcaaaaaggcaaacgagcattgagataggaaagaaggaagaacaagaaaaaaaggaaggaataaggtatgggaggatcaacatcaaaaaaaagtccccattaatctagaccgttcctagacctcaggagggtatgtccaaagtacaaagtgcaatggtccatggtcctctcctccggcctttcccctatatgcctccactgaccgtactaactacgacctcccccctaagtaacggtggacggagtgccatgtccattcccgcggggggtttgcctagcacactgcttgcagtcttcgggagagctttagcatataggagtccgaaccgacagtggggagctaagcagtacccgttaaggcgaaacgtccgttgggaacgtaacgcccgttgagaacgtccctcgcaagggacgacccggccatactaccgctgggccactggggggggctggttgtaatattagtctttgtcttctttacataggacaaaaacttaaggaccaagtcacttgggatcttagacctccgatttatctgccttcctagttggataggagtttcaaatttagtacatagcatctacataagctgagctgtatataggctaacttttgagagcatctaaacatagaaaagtggtggttggcagccatttcaactctcgggtacatgcatatcaagtcaaaaatgagggtattcagacacccattttaggaaggcacgactacggtgagagctggctgaattctcaaagtcataggatcgattcccggcctcgtcaataaattcaatgcacttttttggggtttcctacctttttcccactatattgcccaatatcagaacaccatgacctccaaggctcttccgcatatgcttccacgaaagaatcccactttgtcaaagagaaatcaatgtttcgtttgcctcccaacgcgttaagattccgtctatcaccttcttgcttttcccctttcatcgctcttctagtattctggttctttcacatttctttccttctccaactatcttcatatcctatctatctcacttcatcaccttaaaggttctttacaatggccgaagaaccagaggaggtgtcttgtaccttccagggctgcagacttagcttcaagtctgccggcgagatgcaataccacaaggcgaatgcagacagacactcttactgcatgaaatgtgacctcgacttccagtctcagcaggccctccatctgcacaagattatgagcgaccgccactttgcttgccccgaatgctgtcttgagctccgcagtgaggctggtctggaagtccatatgagaaacgtgagtcgccatcctttatggcaacctccaaagaaacaaaaaaacagtactaacaaactcatcttttccagaatcaccaggaaggacgtgaagtcgcatgcatgggatgcggttgcacgtacaactccgcttctgcagtcatcaagcatatcgaagacaagggatgccccgtccttatgctgccagagaaaacccgcgatgccactagccaggaccttcccagcgcagcagcaattctgtccatgggtcgacattcgcctggaccacagtatccaccctctgaagcctctagcgaggaccaggacacggatggtggcgttccgctggatttctctacgcctcgtatggaaggaaagcgccctgctcgcgacactaactatgcaagcttttctcttgatgattggcccgagctgggcactccagcgactccagtcaaaggcaaagaaggaagtagctccactgaatcgtccggaggtgcccgcctcgatgatcttttgagttacgacagtccttccccgtctcctcgcggagctactaaccagtcgagcgaggctggatctactctggctgttcaagaagcaggcccttctcaccatactagatccactcgtggccgagctacagctcaccgcaagattcaaggtgtggaccctgagagcttctggaatcatgagaaaagtcgctactactgcaactgtggtgcgtctttcttgtacctcgccacctttgagtatcatctcacgatggaggatgaaacaatcagcgagtaagtatcttcgtttctatccgtttatcttgtgaagcaattctcactaacgatcttttttatagttgccctcgatgcttcaaacgattcaagactcttgccgcgctcgtcgctcacatggaggctcgatactccaagtgtgctttccgtgtgaccactggccagattgaacaggagctcagtgaagttactcgtggctttgccgatatctcgcggatgattggggatgatgaaacggagctgggcgagatcgatttcgatgtgagtagccagcccgagaacaatactaccggggcttcggatgcagacgccgcatctctgagtgcagatgatgtctctttgaacgcagtggccatctctttggatgcagatgacgttgcttcaaacgcagcagctgtatcttccaacgcaggggccgtttcccctaccatggaatccctagtgagtgattgggagggtcttgtcttttccgatgcacacgaagaaaatgacaaggaggacccttgaggcgaggtttgggattgagaacaggggtgggattttgaggatgagctttgaggatggtatctaggggttattcttggagggtgagcttcaagactagctgctacggttctacggattgaattttactgatatcaaggaaggatagaaggggaatctccacttttacatagtttcatagcacaaatcaccttgatcaaacttcttgcctggagtagagctagtatgcagcctctgggactcaactatatgaatcaacaatgacagtacaggtactacggaaaacaagatcagaaacgagactggatttcaatttgctcagctagaaaatggaaaataaatatgtaaaagttgagtccggactccatcttcacgcaaaggctccggcaaattgtcgagaacaagagtcataatggctaaataggcatatagagcatagaaaagcatataaagtagagcaatattacccatcgagcccggctagtccccaccctcgatatcccccgtcccaaggaatcaatcaccggacgaggcaaatacgcaaaaccatcgagcaagagcaaggtatcgagtatatcgaggggatcaagccgatagcgtgctagaacgaccacgcaactagcagcaacactcgcagcattcacagcattcgaagcagagaagaccggcgcaactagatgattgtcagtttggcttggtaagtttgtggtccggacgcatttggcttacaggccgcagcagacatcgccagtgccgccaccacgcagctccagcttcagcatgttctcctgggagttctgggaggatattagtctggggttttgtgaaggggagttgtgtcttgtatggcatacaggctgctcggttaccatggggtcggtggagggggcctttgggctgacgggctggtggttctcggtgcctgttgtggcatcgctggtggaggttggaatggactccttgaaggagaaccaggagaagagactgttggcaaacatcttaattgtgggatggagatgggagatttagagagatggtgagtggaaggggaggggaagttcaatgggggaagtaggtacctataggtaagctctggtattggatttgctaattgtatgacctcgagctgactaccaatagagtgggattgtctaccttgccaatcatgtatcaagctgaatttagatccttgttcttatgttatattcaatatttaatatttaataaacttgaagtatatgtggttatgaatattttacacagatcccggtgaatcccaagcgtagtatgtacatgtacttggtgtccttttgtatatattgtgtctttcccttctgttgtagtcagaaggagtaattcactatattcaacaaaattatatgtcaacatctatgatctatgtgaatccaaaaatagccttacgacgatcaatccgatgccaagtatcgtgccaagcccaaccgccaaccataaattttcctccaaccgcagcctccgcaatatcatcgacctcagaccaaaccaaaaatggcaaccccttcacccacagacctaaacgcctcccgcgaagcagactacaagcgcttcaagaactatgcagcctacacattcctaatcggtgcaccgatcctaatcgccctcccaccacgcaaactcgaccctctcaccgtcctagtactctgctccttcggcgcgtccgccaaccacatcgtgcacgaacgcacaggacgcagcataatcgaccggattgacgcgcgcatttccagcatgcagcgctcattctcttccctaccgagcgagcgcgcgcaggagatccaggcacgactccgggccgcgcgggatgcgcaaatccgcatcgctgagcatgaacagttgaaggcgcggattttgtcgctttcggataagcagcgccgggagccggatccggttttgatggaggagattcagaagctgaaggcgagacaggcgcaggaggaggacgttgtgcggcggctttggatgggtggggagtccgaggggtggaaggagaggagattgagggaagagcagaaggcgcttagtgaggggaagggatatggggatttgattcaggaacatatttgggatgtttggacttggggtgggaaggatgggaaggctggtgagggtgttacggatgagaatgtggctgagaagaaggattgagttcttcattctgcggtttatgtctgttttatgtgtcttgtacagcgtctctgcctctctccccaccttgatgtattatattttgccctgctttgcattgggataggtgtttggttgctttttgagttccacctgccaggaatttatcagtctgttcgtgttgggatgtccgtgtacaatacattcattcgaacaagctgcaattgtctacaatatgtatctactctagtattctagtgtatccccatcccagaatgtattagttacctgacgtcgaaggccatcgcctatctcgaaggatcttacagccagtctacggcatctacaagcttacagaaaatgaaccaagtggagaatgatagttctttatttcaaaatacatcttcgaaaaccaagagactccccacgaccatggcatcgcgagagactcctgatcggtacatgatatcccttctggaaagccatgagaccctcaacgaccatggcatcgcgagactcccaagccaaccaaatttagtacaaatcctctcatatccaataaaacaaagtatatccctcccataaacaaataaatgaaacatgaaatatatgcaaaacgcccaaaacagatggtataaatggcaagacccctcattcgagccgtgggatgaagatgagcggctggtttcttttgatgtagatgctgatgctgatgctgatgctgatgctgatgccgatgttgatgatagatgttgttggtcttcacccgacggggccatgggaaaatccggcaaactccttgttgggtgctcggtaaaaaccatggtcaggactgcactctaagtacagcttccttgatatcattcctccattgcacatgtacccattcgaatccttttcctccacgatctggccctccctgcagacggggccggtgcgccatctgcaccaggaccagacgatgtttgtgatgtgtcgtctgtcgatggagtcttccgcgccctactctgggtgggttgtcacccgtctgtgacggttcgtacccaatatgaggaacccagagatcttggggctgattcggaggtcggtgaatggtgaccgatgtgggaaagtgtgattccgttgttgatgtcgacttgttgtcttttcgtgaggcgactagagcagggttggctaagccgctgtctagtggagctcagttggggacgaagctaggatccaattcgctagctagtctgagcatgctctcggcctgttgtaaagttagagaaagtagttacattcagggtttccttgcaactttggagaactgatgactttgggatgaaaagctggagggtggaaagttgggggacggaattcggggggacggaaagcagagtgatggacatcaggttgatggaaagcatggggattgaactggaaattggaaagtgggggactaaccatttccttgattgcaacagcacccagagcgagggctttgattctctgtaaagaagttagtgcatgttgcagcccatgtgccgcttcccagagataactcactggatcagggagcactggatcgggaagagctggagcgtcgggcatctcgatgtcattctaaatccaatgttagcaatcgatcttcgacaagatggatttgaatgtatcaacttactggttcatcggatggtgcatcgtccatctgaacatcaatgtttgatgggtgaatgtcgaggttgtaattttcgttctggttgcggtaggctagacgtctccgattgccatttcgagcctggccctattatatattgttagtatcaaatcaacaatgcgtcgaggggacaatggggggagtacttacaacatttgcctgggcaggacgagagaagctcgggttgtaattcttccccttgtagttggggttgaagttctttcccttgtagttggagctccgctggttgttctcgttgccgaacccgtcgcgagaggtgtctcgctggttgttgtaatcgtgggtgccattgggattgccattgcgagggctccattggttgttggcgttgccgttgtaattgttattgcctcggttgttccaagaacctccgttgttctggtaagctcgtggcccattgggcacaggagatgggccattgccattggcattggcattgcgaggattggcattgcgagggctccattggttgttggagttggcattggcattgtggttgtagttgcctcggttgttccgagcacctccattgttctggtaagatcgtggcccgttgggcacggaagatggttggaagtgcatcttcgtggggttccgtataccaaagttatttttgtttggactaccgcagcctggtcccccggacgagtttcgtgcaagcgaggtcattcgattgaacttccaaaagccggatttaaacttgtaagatgcccgcgaacctctgtttttggcttgtttctttcccttagcgtaggcttgtttcttctcgacccagtgtggatttgtatagtggatttgtttggggaggaattggttttggtttttggttttgccttggctgggatacttcacctcaagaggccggtgactatctccaagtccgacagttaaagacaactccctgaccttggcaacttgcgacgaaggctgggcgatttgatggagtggaatatagatcttcttctttgaacgtgggagggccgagccgtgtggctggttggaggatgtggttttcggtggcctgccagcggccaagtgaggtttatatgccggatgaaagaatgtatacccaaagtggaagggtataggccccaaggaggggatgaggagcacttgcgaggcaaatgctagatgttgtgagatgatttttgattattggagtatgccgatgaccccagtgagaggtgaagaaggaaagaaacgagacgagtcggggggtgggcagaggggcttttataacactcaagctagatgtgctactaagccaatctaggaacggagcttgcttccacggtgataatatactcaattccttggattcgtagaaggtaaaaaaggcctagataaggcgagttgatatgagtaccatgatatataggaggcaggccggtatatcttgagcctagagcagagccgaactgagttaaaaccgaacaatgggccattgttaactataaaggcagacggacaaagaaccttcaggtcttcaacttcggctcgaccatttcgacagaggtctttgggacatctcatcagagctccgaagcctaggatggaatcggcctgtagttgtagagggcacatagacatagaaacacacatgtttgagtttcagtatcctgccttgtcttggaacccagacagagcaaaagctttgaagtgtcttgtgattactgctgaactcaagtcgttctgctgccggagaatagcggaggaatgatcgtgtcggagcacttaatcgaggtgcggacaacattctgtcggcgtatcacgggtcaaagagaagccaaagagaagtcaaagagatctcgtcggaacaataaactcaaatgctttcattctttgggtatttcggataatggctttcttccgagtacaaggcctttgatatgtaatggatgcccagtgcgcatatgtcatcgtgactgtacacctgggcaactcgaggatataagaaaatctatgaaagaaggaaaaatgtaaaacgatcaagagggagaactcatcaagccaattaccatataattccttggaactatgaacttgacctcggactataactcacttggacctttcaaacgaatagacaggttaggatctcaatatttctaatgggattcacgttcgaacacagttcttccgttttcactcgtgttttgttcttctgggccaagtttagggaagatggaagtatgatcaggccgatgagagactagaatcatatgctaatgagctagttatatcccatccagaattggacgttgcgcattgcagaatgttggcaacttcttgattgaaacatacgagagtagtcggccgcttatatgtctttttggtagtgttttctccccttctcggtttgaacagggatcagttagaatttctaagaatagtttcagtcacactcaatgaagcatcatggccgctttctcgaacctttagaatccgccaatagacgaagcacaagccctagagaaacaaaaggagaccagataaagaccagcatcactcatggtctccctcaaagcattcattttaaggcgatttgcgtcgtttctttttatccgcgtcatccaccaaatcaccatgtctcttgtgcccattctccagccttagccgtttcttccgaggcttgcatgcaatttgtgattcaccgtcattcgacacgagactgtcgcgcttgcgtttatccgctttggggttttctttcctaaaacgttgctcctccttgattttcagccgtcgctggacttctgctgagatatcctctgttccaagccacgtcgacgtgaactctccttcttgctcggttattggctgagaaggagattcacggtgtctcttgggggctcgttcttcttctgtggggtcaggacgggctgtgtcgttgtcccgagagattctgcgtctttttttgcgaatgttcgcctctgtgtcagtggattgtgtggggttggaggaactggaggaactggaggctgggagtgtagcgttttctaaggctgtcatgtcaatttctgtttttattgcttggtaaaggtggtgtaggttgctttcttgcgtctggggtaggagtttgataggacttactgctcatctaaagaagtgtcagtcagttatgggatcaaagaaagaaaatcgggcactactcacaatatgttttctagctatcttcagctggttcatcgccagtactgttttgttcaccattgacgagacggtctggaaaccattgacctctggagcaatctggtccttcaccatgcttagcatatcaaggtgagagcagaggaaggcctcatgacgggagaagatctggtcgcaaagaaagagccggtcagttacagtgcgcctgagaatgtccatattttcagtttgcgccttgcgcaacaaaagcgtacctctgaccaagggactggcgggtcatttgcattggacttgatctttgaattagcctttaaatgggcatgcgaatcaccgacgacttcgtcctccgctgtaggattcatggtgggcttaaagttggcagtcatggtgaagttgaagatcggcagctactccgcgccaagagttcggctttgcagatgacgcgcttccgggctttaactacacgacagagagtaggaaagagtagaagagagctattcagttgtatatctacctaggacttgttattcaatctgattctattgtctatattgttcgtttgtgtattgtccctatcccactcggtcctctgatgcgtttctcttaggaaagatgcaaaaagaagcgaaccacttgaaggtgaccacggcttcttgttattatttcaatctcattgtacattaatcgcaagctccgacgccattcatccatgctcaagacctaatcatatcaccataaacccagctattcaagaaaaataagtcatatagcggagaacgctctctcattaccaagcaccagcgtcaaagtcaaatcgggacaggtctttctgtgaatcttcgacatccttctttgctttcatgcgcatgtagaagatcggacagtcacgggatgagcagatgacctcacagtgaagactaccttggcaccgctggcactgagtccacagacgtccgaatcggacctctagatcagagaccttggtgagggtttttgtgtaaagttcaccgaggcggggacggcagttagagcagacagcaccgtccatctcttccttgctgacaagaggcttcttgcagcccatgcaggtctgggtcttcttagcgaacttcatcagtccgcccaggtttgacgccgctttggtgatagaccgtgtgtgctcgccagtgagcaactggcccgccttcttgcccaatatgggttcgaagatacggttgagtgggtttgtcagctggttgtcgaggtagtacttagtgtcaatggggatgttgttttccagaacgtagatgggatcttctgctcgttcatagcccttggaatcacccgcacccttgatcatgacgtaggccacacggtcaccaagtgttggcgcagaacctgcgtcacgcttgtgcatgcgttcagcaagttcgacgtgtgcctgcttgcctgcgtagtcctccttgcgtttcgacagcgcttttgtgatgactagtttcgacatatcgatcttgttttggagcagatctgaaatggtggatttgacgtagctagatattatgttagtttcttgatagctttattttggggatatatcaacttactcttgcgcaccatcaacatctcggtcaatcagaattttgttcagcacggtttcaatgacattttgaaccatcaggcagttatcacgccggacggtctcaataccctttgtgtccatcttgtcaggtttgtcggggtttgtccagtataatccagcgtatcgcttcttgttgatcaaaagataagggaagtatactttctcgaattcaagcttgatgggcgcaacgaatttggaagaaacaaattctgctgcttctcggccaagcttcattgcatctgctagttcagtgacgccaaatttgaccatgacggagtcggtgtcaccatagatgacttcagcatcgtgagagtaaccgttggcgatggtgtaccgtgattctacctcttgttttgtcttctcaatcatctgacggccgtaactcgtcgtactactggcaatgggaagacaaggcagtttacccactgtggcacctgtcagaccgtagacactgtttgcgctgaccttcaaagcgagttgacgaccgttcagcactgcctttttgaaagaatcggtttcggtagccaactccttcttcgcacgctttcttgccgacaacagctcttcgagaatctgggacaaaagtcctttgcgaactttggtggtgcaaaacatgtctccattgggagtgacgatgtaatcgtcatccttcttcatgttcaacttctcaatactactcttgttgagcagggtcgtgtagcaaaggttgtgtgcttgaatgattgaggggtacaatgatgcgaaatcgagggtcgcgacgggcactggatagtaccctcgcttcggctcgatgacagtggcaccttcgtagtcctgctcatcctggggcttggaattgggaataacaagttgctgctctcgagctttccggaaaagttgactgatgaacttgacttgttgtcctcgagacaaaaggaaattaaacggtacgcccgtaactcttgccatctctgtataattgaccaggcacatcaatttgtccattaatcgttgcggcagatacgcatctttcagacagtacactgccagtcgtcgtctcgaatccggggtaccgttgaacagctcagtaatcatcgtgtggtgaacgtcttccttttgctccttcaaaaactcccaggatacggaattaagggtataacttctcaactggtgatctctctgaaccaattggagaagatcaagctgaattctgccgtttgtattcgtctccttcgtgtctcgattgcccatttgcttgctcgaaaattttccactcttaacctctgtcttgaaacctttcaatctggtccaataggggaacccagtgcatttcaagtgcttggcgcgatcgagtaggtaggggaaatcgaagttggcaatgttgtatccgataataacgtcagggtccaccttttccacgaaatcgcgccaggcgtcgagcatcttctcttccttctgaaattccaggatttgggtattgacgatcagactacaggtatcgaggacaaaaacgtttctgatgaatggtttcgtctctccgtatcgagtaacaacattggcgatttggatgacggggtccacgttaggctctgggaagataccctttcgtccggcacactcgatatcaaaggagagaatgcgaagaggtgccattttagcccattccccattgggtggatgagccaccatgttgcgatagtcgacagaagcttcaatttggcagttggacaatcgttgactctgtccaagaagacgatatttcccagccatcgcctcgacccaagccattccagccagcccagtgtcaatcatgaagcgcaaaaggtattggatattgtcgaacgtgaggattccatctccacctgtaccggtccacatacccttgtagttcatgcttccactgccagtctccaacgcacctcgcaatcgagcggccaatttgggctcagtaaccgtaatcttgatataataactcttttggttcccttgaaatccgtagatgttctcgcgcattgtgagctgcacagacgagattgcagtgaagccctggcctagcttttgctctaggaaatgtttgtaagggtcgcaatcgtctttggtgaagctgacaggagcagcgatgtagaggtaatgttcaaagccggttacatgaaggcagaccgattgtcctctctatgaatattgttagatacgaaaactcagctggtagcgaatatatttacctcggtaacaccaaagagccgaatggcaggttttcccatcaggaatgcttcttccgcgtcaatctgctggaaacagatgttttccgtggcttcgtcgaattcaccaagcgggggacgctcccattgctggtctttctccgagttgttctccttcaagtcgccgatatcctgcgtcaacttttcgagcacctcctcctcgaattgacttttctgtggttgacttgagccaatctttcggcgactcatctgcgatgatggtgtgaactgtacagacggttcattgtcgagtttccgctttttgagaacgctagcagatttcaagataccgttagagttattgaccgcgtcgcccagcacccgcttctggggagggatgatagcttcaggcatgacggcaactcctagactgaggttcacggagtcacagtcaactttgtggtttgaaaacgatatgatatgagagtgggctcgtaaacttgagaatgtgttggggtaactccttgtgaaagtcgcgctgtcgcgccttcgacgtgacgtttacgcgtgggagtcacgtgtgataagataagctaaattgaaacaaagattcggggcgatttgattggtcaaaaggtccagggcatacccatttagctctagatatctttttttggcttcttataatagaagaggtaccttttaccttttattcaaattagaggtatacatatgaagagctacattgagtagataagtatggcatgccatcatataccccctcttgaggcccaccaagtccacgagtgcggaaacggatgactcgcctccctgtgcttggcatcgtatgaagtctttgcctacttctccattacgtctatttacgcattctcctgaacgtacagtttcagactctactcaaaagacctgagtctattttgccaagattcgcatgccccacgtccagagacattctagtagaacccgatggaagcagcttgagacaatcatagccccgctaggcttctgtgacatgtttacatctttttgatctcaatcccaacgtggcatctccgcccaagggatatttgatacctgtttatttctgtcttctttcacttttgcggcgtcgttcttgatcaaggagctcccatcttttcactgcggggcaacgatcagagcctccggagggcattacgatctatatcgacttgtgcgccggtctttcttctagttcatcttcttctgttcttgaaattatctgtgtaactcgcctctcattgccaatgacgccagcacagcactgattcaagtcttcattgcggtgctaattgaatgaacagtgtatcaatatgtcgatgtttcgatcagcagcagaaatatcatcagactcagattccaactcgggttcaaaagaaagtcaagttgaggaatctggaccatcaactcctcgacatgccacagagaatcaatctcgcgacctaaaaaaggacaagaccaagcaagtcccgaaagactctggttctacagatgcagactcttcgatctctttcagcgatagatcaacattaccacaagatctggctgtgaatgttgatcaacatgcaaatgttatgacagccgccctcttggaattttactgtcagagtcgggcagcagacatcctcaatgctcaacaaggctcaaataaactgttcagccgacacagtcccgaggctcagtatctcggcaagaaactctacaaattcaaatcacagttcttgtcggctcacggtatcttggccgacggcatcgacagagaggaaatggggccaagtaggcaaagttatcgggataacctcgacttgcttagtatatctgccctcgaggagatgaatttccatgaacccgatgcgcggccttccacaattggttccggcgagaacctcgccttaatcacaaagtcttcaacaaggagacccagcgttgaagacgtggagaatcctactctattccgacggaacactgaaccaaatttatcgtttaggaaacagcttcctcctcctaataaggtggattttccaaccgttcccttgaatctccccaacccttcgatttccctatttggcagttcgcccgtaggggttcctcttttccattctccaacatccccaccgtacaatcagctatcaagatattctgtcgaattccaggaactcaagatcttgggtcgcgggtccttcggcgaagtttaccacgtcacaaaccatatcgacgggcaagactacgccgtcaagaaaatcccactcagccaaaagcgacttgagcagctgcaatctgggggtcaaaatcacctcgaggttatcatgaaggaaatccgaacgcttgcccgccttgagcatacaaatattgttcgatactatggggcatgggttgagcaggcccatcactcacacctgccttcagccgaataccaccattctcacccagcatatgacaagtcgcagaatgactcgccttctccagattccccaaatgagtcaagcatggggattgtcttcggacattctgaaaattcaaatcgcgagtctcagtcaagctctctgtctgaagatcatagtttcaccgagagtatccatggctgggacagccacgcgactacctcgtcccatcagtggaagaaaggttcacgaaggggattgtatgaggaagatgatgacattgaatccatcccccgcgatgggaacacttctgttggccaaacatccactttcggggatactgacgacatctttactgatggtctgagccaagatcagtctaaacttcaagttcaaccccgctaccggcctggtcagcaaccccccgcagtcattcttcacatccaaatgtcactccaccctatttcgctcggcgcgtacctgaaccctcaagccagtccgaagtatgatgaatgttcactcgccaggcgccattgcttccacctcctgccctccctaaagctcataatggacgttgtttcgggcgttgagtacctccactcaaagggaattgtgcatcgcgacttgaagcctgcaaatatcttcctttgtgcaccagagactagcacagcagagatatgccttgcgtgcagctccaccgaaacttctcctaccaagttctgtcgtcctcgcatcggggactttggtctcgtggcagatatctcccacatcaatgaggcctcacagggcacaatgacaccataccgagaaggaccaaatatacagcgggtagtcgggaccgagttctatcgtcctccagccaatctatctgcgtcccaaaatgaccagagctcgccagtggattactttgacgaatacaaggtcgacgaaaagctcgatgtttactcgctcggcgtcattcttttcgaaactgtttatcgttttaacacaaagatggagagacaattcgtcttgagtgacttgactcgtgggtcaggccgtgatccatccgagcgcaccattttccctgcagacttcgctgccaagatcgattttggctcgatcgtgctggacgatggaatttcggtcgcggattctctcatgacatgtatcaaaagaatgttggaacccaaatcgcagcaccgatggaactgccaggatgtcaaggaacatttgcgggcgctgaagaaagccgttcgccgattcgaggaaacgcaggaataaatgcctgaaacaaagtcaaggaccaatgagcctgaattttaatatcatatacccaaacaacaatacaaatgcacaactctcctctatcaaacacacattgaagatcagcattcgggcctcggtcaagtagctctccccgcatttctcacaggccttggtcttccccgcttaaagccaccgtgtacttctagtaatcaaataatcaaaacatccacactactatctagcaatctattactaaataccatttcataatggccaaaatcctccgccccgcaacagctccgtacagcgagccccttctcccgcaactagacatccgcaacccctactatacaaacctgaaccacaacctgcgcgccaccgtgcgcgaatatatcgatatatacatcaccccctacgccgcagagtgggaagaagcaggccaagtccccgaagccgtacgccggcactattgcaagctgggctatagcatcgtgcaccccctcacgagcgaggaggactcagccggcctctctctgcctgggaatgtgccgcgcgagaagtgggatacgtggtgctcacttattgtaacggacgagctcacgcgcgttggatatgtcggtgtgatttgggggcttggtggtggtaatgggattggatgtccgcctgttgcgcgttttgggaatgatgagcagaggaagaggtggcttcctggtgttgcgaggggggatattcgattttgtttggggattaccgagccggatggtatgtggatgtttacttcagaggtataactatcttcaggatatgggttgctgactttgtttactttttgcagcgggctctgatgttgccaatatccagactacagcccagcgggatggcaatcactatattgtgaatggggcgaagaaatggattaccaatggtatctgggctgactattgcactgctgctgttaggaccggtggtcctggaaggtctggtatcagcttgcttgttattcccttggctactgccggagtgactcgcaggcgtatgcataactcgggtgtgaatgccagtggtgggtgcttctttctcaatatgacctgtgaagaaagacatcgccaatcaacacaactataggctcaacctttatcgagtttgaagatgtgcgtgttcctgtcgaaaacctcatcggccaagagaacaaaggatttccccttatcatgtcgagtgagttgccttaccaagggtctgaattggctgctaatattttcttcagacttcaacccagagcgccttactctggcgtgtgcgtcattgcgactctcccgagtttgtgccgaagatgcctacaactacgccatccaacgcgagacctttggatccccactgattgaaaagcaagcaattcaatccaagatcttcaaattcggcctcatgattgagccagcctatgccttcatggaacagctcgtgaacatccttgaacttaccaaagaccgtccttccgacgacgtcaacattggtggtatgactgccttgcttaaagtcatgtcgaccagggctctggagaagagtgttcgagaagcacagcagattatgggaggtgcgggctataacaaggctggcaaaggtgctagaatcgagcagattagtcgtgatgctcgggttcatgtagtcggcggcggaagtgaggagattatggcgggactggcgctgagggaggagacaaaggctattcgcactcggagaaaggcacttgagaagagacagtctaaagtatgaaagaaaatacgaagtcactcatgggtgaatgggcttgcacgagtttgtagtttatacctaacctagaattcatgcagtgaatagggataatgataatgatgactatataaggatagaacacaagcaggcattctatcaaccttattagacagtataaggctttgcattgataccgaagatcagatgaggcctctcagcagcaatcttcagaacagtctgcgcgaagaccgagttcgcccatgcgaaccaaggacgggtatagtcctttatgttggcaacattgatagattcgtgaacaagcccaagcaagctagaattacgaacgagattgaggtttccaatgatctcagcgtcgtcgtcagaggtcatagcttgaacaagtagagacatgggccaggcgtgctctagaccgatatgtggaccagcaatgccgtggaactgtgtacccaccagataatatggattggaagccttgtcggtgatcattttgcgtgtattcttgtagacggggtctgatttgtccacaaagccgaggtagggcaacgagagcagtgaggggatgttggcatcgtccatcagaatacgcgacccatacccgtcaacttcgaatgcgtagacatctccatatttggggtgtttaacaatgccgtgatcgcgaactgccttggctagcttgataccgcgttcctgcaggtccgcaacgagacttggggacccaccggctgccttgatgactttcgctgtcttttggagctgtacggacatcatagcgttgggcggaatgaagaatcccaggatcgtagcgtcatcactggggcggaatgcgctgcgaattaggccagtctcgctatttagcgggttgccaacaccagctaggttgagggtctcagtgccaatggtagtctctcgttgaaacgtgtactgattttggacgaactggccctgagtattgaatgtgggctgagactccgcgtcgatggtctctagcacagtttgcaccgctttataccagcggtcggtcaagaacgcaattgaaccagtattttcgtggaactcagtgcctagctgtaggaaatgggccagagagtcaagttcatacttgcactcaaatacaaaagaactgtcatatgcaggatgcacagtgtctttttggctactggcttctggcttgatgccgctgagagccggtggctggaaagcattgcaatagggcgactggatgacaaactcggactgagtgttgattgcacctagtatcagcgagtaaagactctcgtccttagcagctagtttctggtaatttgtgagctggttggttgagtcacgcagccactcggcgttgatatcgcccgtcacgacgaaggtctgcactccggtccattgcgcgccggatcgcttggcattggtgccggatgatgtcgatccgtttgtatgccaacgaattgtagtgtctaaggtatttggaaatgcatttcggaatagctgggcaagatctttatcgactaggcgcgaggtgatatcgtcaatgaccttctccaccgcgggcgatgaaaatgtccgacatggttccgcaggtcgctgaaagggaagattcaagggaccaccactatagggagcgctgtaatattgaagttttgtttagcgaatacttgacatatctcaatgggggtattgacactcactgcggtgttgatgcataggaggtgtagtctgggcaggcacgtcgcaagatggctgggtcgtctctgtctgggagagcgctggcctgaaggcccagcagagcgattgcgagtgccgtaggaatattcatggcgcaaatgtcaaataggaggaaaattatggacagacttgcactgctataaggaagaaggccggggttaataagaggggatgtgtgtcgatctcaaccggacagggatacattccactacacacatacaacttctccgtggctgtttaggagtacattttgacatataatatagaaaccttgaggtgattcgctcggagaactactaagtaccgtgcgaaattgaggtgacatcgctctacgcacgatgacacccttccccgcataaagtgcggagaagatcgacgtcgcggcatttccttgttgggtttatatacttgacatgagctggacgtatgctttagtattagatatctatgctctcagaaatgattgggcacctcaataatactacagaaatcacttcttcccaaagaacgacatgatattaccctgccccgcagctttgccagccttccctttgggaacattgaccgcaggcttcttcttaggcaccggctcatcctcggagaaagactcccacgtcgcctcttcccgggtaactgcaacaaattagtatacgacaaacgaaggggcctcagcgggttgcacggacctaagtatccttcttcatccttgaccgtcttcttcttcattacttgccgcttgcctcgccgccgcccgccctgtatagtcacttcttctttaagttcagctggcttggatggtggcggttgctcaacaggcgtgggctcccgtggctcctcatcggcatcaggcatttcctcatctggatccatgtcagttcaatatttcctcaaggtgcaatttgagatgaggacataccggcagcctcgtcatcatcatcgtccatcatcttcttgagcttttcctcgcgctctttcctgttttcgcgggttcctgctgctactttatcggtggaatcagggaacaattcttctgcttcttcttcagaggctacaaaatgttagctaatgcatcaatctaagtggggcgaactaaccatcttctgcaagaggtgtggcctgtagtcaaagttaatagaacaagatcagtaagagaaaaaaagataatattaatagaatgcagcacgggtgagggcacgaaccggttctgcgggggctggcgtctttgtctttggctttgccttggcgaaagaactgaaaatattgcctttctgcttggccggcgcagctttacccgaaggcttcgaggatgactgggagttggtagcagagggtggctcagacatcggtttgtccaacttagtagcttccgctttcgctggagatgcttcttgctgcagtggccgtttagagggtaccattgactcagtcgaaggcttcaatgccttgccagccggcgccttcgcagatggggctgcaggtggtggtggtgggtgcgcgccagtcctccgctggaagatagataaacattagatcatgatagacccgtcgaagtaatgaacgacctaccctgacatctcgattttgaatcataccccattgcttgccacactccaatggatcctcctgctcgtgtgtcctcgcaatctcccgactggcatcaaccaacacattcaaatccgggagagttgtagcctcaagactgtagacatgaattgtagatatcgactggaatgttgctttcgcatctggtcgattccttcagtaatcagttcatcaccgagacgaatctgcgtaccttcaaggtcttcctcgcgtgctaatataatagaggtagtgcgaattgagtctgaggcatcctcgtccggcaacgagccggtcgagtagggactactctgcatcatttcatcttcatcgtccgcatggccgttcgtaggggtcggttcgggcgctttctggataccggagatgacgtaggttgcgtggacggtttttggcttcttcgcgttctcattgcgatggaattcaaacaggatactatgcaacagagtatcaatatcagctccaaatccaatacccattgttgcgaacgtagaacatactgtttggcccgatcggcgtgtactttcaacgcgcggctcaataagcgatacgtgacctaattctagtaagctcctgcttgtctgaagagtgtgagaaaatcttacaagacgccgctcattgagcacattttcagccagatacaacttcgaatccatagttgctttgctgttgaagtgcaagttgctccgacgcgtgctcaaccacttaacgcgtatcagtcagcgggtcttggcatttgcggtctcctcaggcgacttactacccacttacaattctcctttttcggttgccttcaccgggtgagtccggttagaatttctacagaaaagagctccggagctcagggcttgggcctcaattcaatggatcagtcgttcgagctacccgactccaccgattggttggaaacgccactttcactacttgcgccgttcgaatcctcattacgatgtcaagtctgcaaagacttcttcgataaccctgttattacttcctgcagtcatacattctgctcgttatgtattcgccgttgcctcagcaccgaaggcaagtgtccggcgtgtcggagctccgaccaagagctcaaactgcgtcgcaattgggcaatgcaggaactcgtcgacgcgttcaaattggcacggcctagtgttctcgatcttgcgaggagggaaaatgtgcgcctggctagagaaaaggaagatatagaggagccaacccaaaagaagcggaaggtcaatcgggtggaagaggaggaggtacaggtcccagaaataaattcgcaaggccgacggactcgctcccaagtgtccataaatagctccgcacaagagcgaacggttccccgggtcgtgcctgagatcatcgaggacagtcaggacgatgaagaatatttgcctggtatgacacttttatcatataaaagcctgacccgtctaatcccctcgcagaaaatgggttggttgcttgcccaatatgctttcgcaaaatgaaggaagaggcagtgtttccacatctgaacatacaccaacaggaagaagaagcgcctaaggaaacccctacaaaggcaggatctttcgggtatgttaattctattgcatgtctagaacatggcgctaattggagaaaaattgcattacaggtcatcaaaaggcatatcccaaagaggccttaccctccccagcaagcagcccgaacggcttccggctataaactactccatattaaaggataactcattgcggaaaaagctccgggatctcgggatcccagactgggggcaaaaacagctgttgcagagacgtcataccgagtggatgaacttgtggaatgcaaactgcgactccaaacaccccaaatctaagcggatattgctccaggaactggacatttgggaacgcacacagggtgggcatgcgacggcgccgtcacgattcacaacctccaataatgtgatgcgcaaggacttcgataccaatgagtggtcaagcaaccacgacgatgactttaagcgtttgatagcaaatgcgcgtaaaaagagtgaggcccaagtacgatcgactatccctggcgcatctccgtcttcatctagacagaaggaatcacaaccccagcaggatactggattaccggtgaatggtgcacacgttgagttcagcgcagacaccgatcctaattttgtcattaacctatctgggtgatctcaaaagaagccacattgaactcgaattgagaagcacccagaagagtaaactattcattcacgtaaggcagatatctctccaacaatttggagaatctcagtttgcttgcatcgggcgatcctcgacggacatgttagagagcctgtcaataatgttatctgccagtgccgagtccgcatcttcggccgcacgtgctcggcgggaagcctcatcggaggcctgcttgacactgtccagttcggcaagtctgctctcgacgagtgcctctctctcgctcgtctccattgccgcaagctcatcatcaatctctccctcgtcaatgactggcccagcctcgttcatgacgcttccgacctcatccaccttggccatctcttcccgcaattcttcaacaatgtcctcaaccctctcggcaccaccgatctgagtatgtagactgcgaagcacaccagtgcttgacttcatgatccgcaccatctccacctggtctgcagcttgctcgatctttgaataaacctcatcaagctgtatgagagtggtagttctgtcctggaggttcttttcagccattttcctggaacgcacggcggacagcgctgatatgcggttcttgttcgccaaggccgtcttcgcagacgcggtcagctcagcgatctttgctttcaggcttgtgacctgtttcaacatagtcaactgcaaggtcttgatggatgcaatagttgtgtcctgttgggtgatttccgccgattcatctgccgatttgaacttaattgtctagccatcaatcagtcaatatctgggtatcctggccatattatatagtccaacttaccttaccatcataggcaatagcactgctatcgcgggacaaataaagcaacaggacatcaaaatctgcgtctgataattccgtagcttcgttcagtatggccgcaaactcttcaacaaacatttccctagagtaaataaggtcaagcttggatgatttgccgcctgtggctttcttaaccgctaggtctgccgcttcctgtaggttctctatcaagaccaactcctgcacctgcagcttcggtgctgaatcgctatcggaacccacaacgaagcctttgagctgtcgagctccccagctcataacattccaaggactcagaaccccgggatcaattagcttccactgacttttcttttgcagaagcccagcagttgtcttgtaaattggtaatggaatcattgaattcttgcgcactgcctcatcctgtaaacctcattagttagcttaacagctctgtcatccaaggggaagataatagacctacaaatacagtacccagagctgcgggtctcccccactccggactctctaaatctcggagcagcgattcatccgttcgcagaattagatggtctgtcttctttcgtttcaagggtgctccgctctcagctgatatggtcgagccggaacgtacccgcacaccgcgtgacgaggtataaccgcgctttgcggctcggttgagtgcatgttcccatgcggcgacgttaacagcgtagccgtcggggtttgttttcttctgaggtgtgaaatcagagtatagggagggtaaacggttcctaaggacataacatcgaggtaagcatggtatcctctcttctgtttaggactcggtttttaccttcggaatgcttcctcatgagtgaggatatatttcagtagttcgctcatcatgcaagggtatgttgaggaggaatgatatgacccgctgtaagcagataataataggccaagttgtctcggagacaaagcagatagcgcaacagctttatcgataagccccacgtgacgcgtccgaatgtgatgcttagcagttctacgacaatcaaaggatgcctaaatttatgtttggacaagcttgtattctatggctatatgctatggtgaggtattaaggctgtaatgagtctaagctcgttcaaagtcatcattgggtgttccctcagagtccagaggcccctgcgtcgtgttaaaggctccggtatctagctgcacaggatgcccgactagagaccggcgatgatggcgcatgtcgagcttctcgctggtctcttcggtgtccaatggatcctcactagccggtgcatctcgggcatcgaatcccctcgattcaagatattcaaccttgacagcatggcgcagattgtcaacgaagctctgcatctcaggcatatggaacaccccgtcagcctgcaagacgtcagcatagagaagctcagcttcttccagacaggccgaggctagggttggatgtccagatttgagccattgatcagcagcaaggatgctccacatgccggctttccggcgacgtccaccccatttcgctgcaccaactggtgtcttggaagcatagcaagctgctaccctttcagtgtatagaatatgacccactgagcccacaagaccaaaatccatgacccgcatggcccatttggctgcgctctcggtagctgacccgccacgagacttgaggagttcaaccgctagggataaacaacgcagtgcgtgtggcgcatctgaacaacgtgtgagataggagtaacaagcagtctcgaacatttggtcgacgctctcaagcttgattttggctgatgtggccaatggatttaaaagcatgctaacagcgcacatttcgtgcgcaccagcgtgatacttccaggctttgtcgttaccataatccgatcgaatcatatcgtatgtagacgcagctaacttccaatcgcggagcatgaacgcgaagtccgccatctttcgcaagagagcctccggggagtctggactataagaatgttgtgctggatcgtagttcccgccgttgcccccagacgagcctccgatacttgaacgtgagcttgaaccgaagccagcccaccgccgagacatcgacataaatctgccacttataccacgcctccgagatgcaacctggtcgttccagacagctactttattttccatgaagggaatgacggactgcaccacgagttctcggatgaatgccctaatcgcagtagcatcggagccaaaaagatatggcgtgccatcagtgccgagatcaaccaaggcttctagcaggaagttagtttacgtctgtttgtgtagtagcgaacacttgcctgcttcacctgcccccgacagatactccgacggcgagagccattcgcaccggggaacttgcatgctatcatcgtctgtcaccacacactggctgctccgaagtcttaaaagatggcaatgtagcccaaagtgccgcttcatctgatcataaagcttgatagattctgtgatatcgtctcgttcttcgtcatgaactaaaacgtaataacgaagatactcctggttgatccagtcgggtagctgtttgtctccagtggtaccatcagcatagagctgcctgagtgactccaaaggagctgggttgcgcgagctgatggctattacattggctactgggtggccaaatgtctcgtggggagctgtaggtgccgaacacagcagttgctgcaaaaacgacttgcataatggggttgttgcagggaatcccagaacatcctttgtccgtaccgacgcaccaagcatgtcatctgaagagtctaactgcttggtcaacaactcttcaatctgcgccaggggcccagagtctcgactagccgcggccctaccgatcgctctgaaatcaacaaaggacactccaaaatcctcccatgcacgactcgagcctatactatcccggatcaccacctttccggaaactgtttctccaaagggccgcaccaactcccaaaatccccctttgaatcccttgctcctcaccaaattatcggtatcctccgaagcatggactgcgatcgtcggtgagaatgaccggataattaatgatcttatatcttctgaaccatcggactttccatcgaaagcagaaccgattgatgaccttgctaactgtggggtggaagatcttcgagagcgcgagtgcgacgagccagatcgtattggtaagtcggcgatcgtgtttgaaagagctgtcggcgaggagacggtttgggattctgatagttccgcatctaaagattgatttgtttcatgttccccatggtatcgtgatggtgatgtggatgcgactcgcgcaacgccaggggagaaggacggcggaggtttaaccggagcagcatctccgggcgatgtcatgggcggacacctgctgctttttgcagatttaaagcgagtgcagttgatcgacaggccccatcgactggtagatgagattggaggagttgtaatagagcgagtaggtgactgcctctatgtatgtatcacatgatctgtaactagagataggcagagtcagcgctccggtcaccactgagggaaggggattttcaccgctctgccggttgaccgccctcaaaggcaggagattaatttatcattggggagtttatcttttagaaatacaagcacaaccacgctctcgtggattttcttgtcagaaagaagtaattcttcataatcaatttcttttctgggagagaattaggattttctagcaagacggtggatacctacaatttgttaacaattaagtcacttttatcacatcaactactttatcgtcaagaactgctcccaaaactgctctatataagtaagcggacggattttcgtcaccgcctcgtcggttgaccggttttgtcattccttccatcagtcaacatcatcagtctttctctgtaggaaaagggatactcatacagctgcattattccatcacgttcatcaaaaatctacaggaggagtcttccccacgagtggcgtgaggcagattgcggtctgacaacaaccacctctagttgactgacaaaatccactggcaacatggagaaggtagataactaccagccaatcagtcggaacgataacactgtccgtattctacgagccttcgacaatcaccttccggcagatggcagagccaatttcatccgccatctccagtccctacaaacaaaccaagacatccatgatcatgccgagtccttggtaaacggcctgcttgcgccaatgaagacgcttcgctcgacacccacaatttccccacgtgctggaatggaagactcgatcgagaatattgcttcgcagtcgagtggaccgttagtaagagaaactcgacttaaggcagagtgcctgaagcgtgacggcaacagatgtgttgtcactaagcgtgtcgatttccattttctctcaaaaagtgacaccactactccgggagccatcacagaatgcgcccatattattcctttctcattggcaacatggcgagatgagcgcgaatcacacgctaaaaacatcatatggacaaaccttatccgacatttcccagcactcgaaacgagaatcagcttttcccgggataatatcaatgataccatgaatgctatgacaatgacccgtgatcttcatttctactttggccatttttattttgcgtttgaggagactcaagtgcccaacaaatacagactacaagtataccggccaaatgcattttctccccctctccctcggacagtcaaatttgtgtctcgtgacccacggtatgctcttccaagtcccgaactcctcaaggttcatgcagctgtcgcccgtattttccatgcatctggagcagcggaccatatcgacaaaggattccgagatctaggagagactagtgttttagcaaaagacggcagtaccgatgtttcagctatgttggctgttacctcacttggtgttctcggctcacgcactgggaatatccagcagactccagcgaccttctcgggtcccaaagctcaaagtgtttcaaaggttcacagtgggttgattgaagaagagggtactgatgaggaatacaccgtgtggtactgaatgtttcttgaggtcactttgaaggcaagaattgtcggccgcttatgcggccttnnnnnnnnnnnnnnnnnnnnnnnnnnnnnnnnnnnnnnnnnnnnnnnnnnnnnnnnnnnnnnnnnnnnnnnnnnnnnnnnnnnnnnnnnnnnnnnnnnnnnnnnnnnnnnnnnnnnnnnnnntatgcggccttgccaggtattttcttgatagtatttcttagcgtctaggcatacatatctatatcctacaacaacaaaattcgatatggtgtactagcggttcaagactgcgttggaagtccgcttcaaggtgttgttggggagaaagccaagtcgacggattcgggccgacaagcaccaagcaatggaatagagcgacagcagccgtgaacaagctaagcactaaatcattctaaaaaggctaaggatcgtcttgtcgattgtaaatgtaatacagagtactctcggtagaagctgatagtcgatctccaagtggtgatgcaaaccacgtgagggccatgcttatcgacaatcaaaccgagttagtttctcggagcatcaacctggctctgtccaatgcagttgcactcttttgtgtgtgtgtttaaagcttctggtatttcttcagttaaagctccatttgcccgcactctagcgagaagagctggtcaaatacgcccgtttcaacaacatctacccctccgaacctactctgcatctgtaccccgtcgcatttccatgcgcaaccccgaatcggacccggacttctcagaacgagtcagcaagagacgacgcatttcttccccgacgcgggaaggctcatacgcaaccatgagctccgccatgcctaccatcgagctcactccacttgaaagcaccttacgaaccctactcctcgatgtcgcacaatacatcaccgagcagaaaattgccaatggaggcagcactgcgaaagatcactccgagactgtcttgcgcttcacgggcgggtgggtcagggacaagctgcttggagtcgagagccatgatatcgacgtgggtattagcaacatgacaggataccagtttggtatggccctgaaagactacctggatgttccggagaatcttgaaatatacaagaaaggcctaccgaatggggaaatgcacgacgccattgtgagccttcacaaaatcgaggccaacccagagaagtcgaagcacctcgaaaccgtcacaaccaagatcttcggcctggatattgatttggtcaatctacggaaggaaacatacacagatgacagtcgaaatcctcagatggagtttggcaccgctgtcgaagacgctttgagacgcgatgcaactatcaatgcgcttttctacaatctaaatgagtcacggctagaggatctcaccgagagaggactgaacgacatgaagaaaaagattatccgatgcccaatggaaccatatcaaaccttcaaagatgacccactgcgtgtgcttcggttgatccgctttgcgagcagactgggataccaaatcgagcccgaaaccgaagccgctatgcagattgaagacatccgcgaggcattgaaactcaaaatcagtaaagagcgagtgggaaccgagctagaaaagatgttgcgtggtgagtcattgcacgtgtccggtattctatatctctaacaagtcgtatctcatatcttaggtcccgaccctcgcggtgcattgcagttcatcgatcgactccatctattcaccactatcttcgctaatcatcaggacgaagttaaggctgatacatcgacatggccttttgcatacaatactttggcgcgattgctgcatccagaggctggtgacagcgatgaacttcaggcagttaccaagcgcattcgtgagatcttattccgcgacaaaactaccatatactacgcctggatgattgccacatttgctccctggacttcaattcctggccgcaccgggaaaggatccaagcccttgcccccgcgagcggttgaggttggaagagatggccttcgcagtgacaacaagacgctcaatgcgctccgcgctgctgctctgcattacaaggaaacaattgcgacaaaatccgcacttctcgcgaacaagatgagtggaaccccggcagaaatccgacagtgcattggattgcaaatgcggtcgtggaataaggactggaagctttgcattctcctggctattctgcaagaaaatatggcgctccgtgactttgcagaaggtaagatccgttcccttgatgataacattccaattcttacaatgtgcagtggcccgtgaatacgaccagttccttgcgtacattgtagaaaacgatctggagggtgtttgtgacctgaagcccattgtaaatggtgacgaaattatgaaaagtctagggactaaaaagggaccttggatgtccaaggcagtcagcatggcccttgaatggcaacttcttcatcctgatattatcgacaaggaaacggtgctggaggagatcgcgggtcgacgagcagaattcgaatgacgtccgtagatcccgatgacaaataaaatcccattccacggcggggacaactcaaactacttgaacttcaattgtttacaactcttctctttcattgtaaatatcccagaaatggataaactgcgcaaagaagcccgtgaggctctcgtgctgaaccctggcaaaatgccagtcggtttcttccccgccgttgcggctgcgtccaaaagtgatttgggtcaattatggcaagacattgctgcttacgatcactcgacgcatttgaatgtacgtttttgtggatttgatgaagaaaaatgaactgattctccagatctgcgagagccttgttacggcgaccagctatatcgactactgggatgggatgctgccaaatgaccaaggcccgcgaaccttgaaaccagctgaagccaaagccgtgaacaacctattcgactgggccagtgctgctgctctaccttcgtcggattttgctgtcgattttgacgagactgccgagatctcagacggtaagttcccttataaacataaacatgtggaacttttactaattgtgccacacagatattatcaaggctcagaatgagagtcgttttagatctgagctcgctctggagctgattttagttttaaacaagcccatggcaggattgccaaatggcaagccagacaatgcggcggacattctcctcgcgggggcatgttttgtcaaccagcaaaacccatgggtcacatcagagagctacaatgcgacgtcgatgctcatgaacgtgtgggtccaagacactcatcttgccaatacattctggcccgctatagacttcatccttaaggagaggattaggcctctttttgcaaagacaaaaaaccccgccatcaccagtgccgggcgcaagaacttccatcctcaaactctacctcgcttcggtgcaagcgatctggacgcatccgcaaagccatggaaaaccaccgatgtctacgtcgcatctgtattgtcatggatcctctcacagtaccgacccgaggacaaggcacagttcgaaacgcacttccagcttttcgtacccactatcctagcaatgattgacgacaacaatatcccattcaaaacaaaaggctgtgccctactcattcagctgctgcaaccaatccaagaaagcggctcggatattctccgacgaacaaacctcacctctgtcttcgaagacgccgtcacgccgtgccttctatctctgccatccatcacacccgaagatagatccttagagctactaggagaagcatacccagccctcctctccaccctcaaaaccgcctataaaggccccacccaatccgaacaggataaagaagcctacactaccagcctcgccaaaatcctccgatcaaacctcatctcctccttccaccatgtcagctccggcactccagcctccttcccacatccccgtctctcaaccttcctcctacaaaagataacgatcgtcatcaacgagctgggaatccacactacaaagtacctccaagaaatcatcccagtcctccacacaacactttcaaacccattcggaacagcacatcctccgctgctgctagctgctgctgcagctacacaggcggtgatcaagaacgcacacccacgtatctggcgttggcgcggtgagatcctaagcgggctaagttcgtgctggctccatattgccgaggatagcagggattccgtgcctgagctggctaagctgaagcgggagttgcggcagacgcttcaagttttgaaggttgttttgctgaatcctgttgccattgcaggtgatgccccagagccggaacagctgcaggtgaaggaaaatgtggagaaggagttccaggaacttgttgatgcagatgcagagcttaagggtctatttgcttgagatttactagcaaattctgtctgaagggttatttttaaacaacaattatgacaatctcaattgaagatatctgttaggttgaagtccggacttgctcttgagatatgggtagtagtcaataaccacgatccatagaagcttcaataaagtaaaataatatgtaacgagggtatcaatttgcaggatactgtacgccaaaacaaaaagaaaaacagatactcaacttcgcatcatggatcaacccgctgcttgaaaagactcttcccgcgcaaccactggcggtatcgtttatatctcttcttttcgtagtcctcacccacgacagtaataccgtcctcggaaacatccaagaactcagcataagccagcatatttaccccagccctcgcctccagcgcagattcctcgacattgcacttgttcgcgtactccaggagatcgaggttgtagccgtggtcttgcagcgatgaggctgtcatttcatctgcggatgtgacgacaagcgggaccttgagcgggtgattaatgtaacgctcatattcttctgcctcggcactggtaacagagggactgagcgagtcgctgactagctggccgagggtccactgagcgatctccgctttgctgggggtggcgtgggcgtttggggggtcaatgggtgggatgcgggatacatgagggattttgaaagcgggctctttgatgatgcccgtgagagggggctgtttctcggatgagggtaattggtgggcccacatatgtgtggaatcaggtattggcaccgtgcttgatgaggcgctactgcggggggtggatggctcttggatcttgacgctgcgctgtggtaggcgctcgcgttggatttgctctggggggatgcggggcacgaagggactgagatcgggaactgggtgccctgggcggactgggggtaggtagcgggacgtggagttcattttgcaggagaagactttggagagggaagacatagcgagtggtcggtagtattccatccagaagtcatcgaaatgtgagagtggcgctttaggatggaatgggaggggtggaaattttctggcctctaaattttctggtgtgtaccaggagatatagctgggtttctttctgtcaaagtaggctttaggatcggtatggtggagatagtagtccgtaggaagatcccaaagcatcggaataccttgcgcgaatgtgtagtttccaagaaagaggttatatgcctcttggcgctgagcatcaaggaaagagttgttgtaataccgcttgaagctttctaccatatcacgagaatggctgctccattgattaatcttgcggtaggtagccatggtgttcaccaaatgcgatccgccgtactggatagcgatagtgtctccatggtcatgccacatgttcgtgaagagattgacagcatcagtatcatattctacagttgtgtcatctatgacaccaagcgcatggagctgatagccaagtgccctcttgccaatgacaaactgcgcagcatttgttcggtcgaggcaatcaatgcagttggtccttgcgacaccgttctgaagctgcaagccggattctgcatcatccccattcttgaaaaagccaattttgggaatgatgtcgcccgcaatagcttctaacgtcttaatgacatcctgatcacggctttttgcagcacggctcatatcccacgcctcgtaaatgagcttcttgtcctcaggaagaaactggttcaagtaagtcaccgcgttagtgaactctttgaggagtatggactctcttggagttcgttcgcgggacttaaccaggttcagaacatagattggagcaccatatcttcgaaatagatcgtcgaaatgcaatgccgcagccgagtaaaatggatccacgagattaagctcaatatccggtttcggtgatacgcccgtgttttcttgagtccagtgaagaggaatgctcccacgatgttgaacatatgaagtatagtgagggtttgcataaagttttgggccagcagaatggaacgacgttgttgtctgttcacatacaatctgctcggtctccacatcgttggccacgtatcccaggtcgtttgcgcctcgtttgagaaagcgcgctccagcaaagaatcgggatcgacgtgcgataattgtaatgtagaccactcgtccatagacactcatctttgactgatccacatatccatgaatgataggtagacaccactcatagggattcttgagtacctcagcagccggggaaagaagatgatggttccaaataaacatggaatggtaatcatgcgaagatggttgtggatggccatcctggtgggcttcgcgatcccggcagatattatgctggagtgtgcgagtgatgtcgtaggaatagctgaaatagaaagaccgcgacaagtctaaattattcaaaatcgcaatatatcgtgcctcctccgaatgtttctcagccttaaggtgtgaaggttccgaggtggtcaatgggatcagttcggtttcgtcgatctgatagacattgtggccacccagcatggcaacctgggtcctcttggtaacgagtagcatatagtatgcacccgtgaatcggatgaatccaagcaatgcccatgcactgcacttctggttaaatccgccagagctcctgttgccgtcgtcgatcgcatccagcaactgaaccatctcccttttgttgtacaccatgtcatcttcggtaatacttaactcgccagaatccgaggtccgatcaatcttcagaatccgaaaacgagtttccgcaagattgaacccgaccatatagaatcgagtcgcggtttcgtacagcgtaaatttgtgcaagcggttgatcccttcatcctctaagttgtccgaagccgtccggtgtttctgcgcaaaagtcgttgaagcctgtcgctcaaaggaagttgctacctgtggctcctcgtcttccacatccccttcctcttcctcctcaatccgagctccgggaggtggattgtacggtaatgggaattctgacccgactgaggcgtcatcaattattccagtatcatcggtgcgctctatttgcgacgagggtttgatgctcgtcgtttgggtcgaggttggtccccctgtggtatcttgtttcgccaaattcgggtcggatggaatctcatcgtggaaaggtgcttcctgggacactagtccgatgagagaaacatcatcaaagctctccatagctcaagggctcgaatggactcaaaattgtgctggaaaagctgcatacatatctaaatgatttctagtcaaaggcgatgttcggaagttcaaagaggaggtccccacacatgacgtcgtagtaaatagcggccaattggtcacaaaggcattctagggctgtatttctattttggtacttattccagacgtttggtttctttctaggtgtctttactagatatgctcttattagtagacaaatgtgaatgttcgctgggcactgattaggtatgccataccaaagtagcatatgaagagccgttaccgatagtacctgaaaaggagtaggatttcttttgttgcatcatatatacaattcgagcaacgatataccctcttttaaattccaatccaacgcagtctggtgtacaaaatgcgatttacaattaatgtatcgagaactgggactacgcgatccctcaaaccaacactctcctcaatccatcagtacctccaagcactctcctccctgttacaggacacctccccttgccactctcccatttaccagatcgttttcgggggccttcttcagagtcatctccactagggctcttctttgtctcttcatcgtcacctgtgatctcctcttcccacggtgcgccagcgccctcgccggtcatgaaatccagttggcgctgatgctcaccgttcagccagtggaagatgcacacataacagaacacgtaccccgtctggcaagcagtcgggttgacgagcggacccatgcagacagggcaagtatttgcgctggaaggatcagccggaggcaaagacacagtgtagatgggaagataagaggtcgctgaaataggcggttggtggcgacgaggaggcttgagtgctggtttaagatcgccggcagcgctcttcttctcctgctcggcctgcttcttcgccttctctttctcatcttggattgacgatttccgtcgttccgcaggagaagtcaaacctgccacaatgggggcaggcagatccaggacctcagttgccttgcgggctagctggcgagagaagtcgcttgcatgccaccattctaggaacttgagggcgaagatcgacgcaggaaggaagtagcgcagcgaggtcaagagctgagtatggaggttctggggactaagtagaccaagcagacctccgccgggtcgctgagatcgcccggtgctggggccaggcttgggatctagcactgcggcgatagcgcggtggtctgcgatgccgaggcggcggatacgcgtgccgataagccataggaatggggaggagtattttgtgttgtcgaaaaggtaggctaggttgaactccagaacagagaaatagtacgccgcattcacggatgggtagacattgcgcaggaaccacttgtagtagaagaagatgcgttggcgtagcgacgggttgaccggcagatcgtcgctgggattatatcgtgggccgctgctggtgaccagggatgcatgtggcgcggcatgaatgtcgtatccttcgtctaacttgcgctttaggtaaggtattccaaccatgacgaacaagttcttccagatgtccgtcgagtgtagcttcagggcctcgcgcacggggcctgcggcgccaacctgggcgcgcgggatctcgccattcttggttcggagaacgcgctcacgtttcaaggaatagaagttttctgtgaaggagccgccgaatgttcgcaggtagtaacgttcgactattaatgaaaggagggcatagatttcgtcatatgagttgaggatccggaggagatagcgcgggtggcggtgtgttgcgactgcgagaagataacgcaaagacgggggaagaagatccgagagctgttgctcagcgaggagttctgttgtcgagcacgaacctagcgttagcgcttctaatcaatacgcggggaagcatcaatcgacttaccgaagagcgacggcttgtgctcgtcgaactcctgttgaagactaggaaggtactccatcgtcaagagtgccagtcatccttatcacggtggtatttgagggtgtttgaagagagaaagaggaagagtcgccggaaccaatgatcatatgccgaggctcaacttatccgagctgactacgtcgctccgggcgggctgaagatccatacattcagaggtatttacaacaacttcaatatgtaacatgagatacgcatggaatattgtacactggagaacatatgctagattattttacaaagttgtttcctcgtcgttcaattttcccgagcaagtgcctcctggcactcagtccagggcggcatgtagaagctcagagacgcttcaccatctcgattctggagtgtcgggtctgctaccagaatacaatgcatgatggctgtcacgatcggaccttgtagcacaatagcaggggactcttgattcatcaatgctacccctgtcgacagacactcgcgcgctcgcacttcctcgcccaactcagcgtgcaacttgaacagctgcacgtagtcctcttgtgtgcgattagcacctttcaagggaaactggcgccacagacgccaaaatccgttgtaatccccgcattgaaataatgtcaccataagctgacgcgcatctactgcgtcaaatggaatgttggccgccgcgagtatcttggacagtcgagacaagatctgtttctgagacttcgtctgttgaacaacagacgaacttggagaactctcttctgggcgcaatttgttcgggctcgaaggtgctagattaggtgcacagacagcttgatagagtatattgaaaattttcatgttcaaaatcggcacaccacggagggccaagcgatccagaactaacaaagcaagctccatgtcaccctctgaagaatgagtcttagactgctcggtgataacacccgctgttctcggtgttagaagggcagaaacaacatcgaatccaagctcatccggaatttcatacccgtcgcgaagaaaatcagagaatgtgctaaaaagtgcatccttggtgtaagctgggtgttgccgagacacagcaatggagaacaatttcaatcgaaaggtggctttttcctgtggagagaaccgcgcggcgtggttggtatagaagagccgtagaaaaagagtggactggcgatcatttgggccgcttccaagctcatttcgtgcactatcggctggaagttcagcgagaatctgaagcaaagatgctggtgtcaattgagatgcaactgctgctgcgccggctggaatagtggaagacgaagttcccatggccgggaaaccagcttctaacccagactcggtggagttcatggcagatagtgcgagtctacgcatggtatgaaagcctctcctttggccaggaatggaaccaaatccatcggacatagacctggggggtgcagaaccattcttggatgaatcctctgtgctgtcccggatgttcttgcgtccttcgcgggctaaagtagtctcccagaggccgtcaaggtcaacatcagcccgcttctcctcggtgaagatctggacaaccacactagtaccaaggtcaagattaccaaatccctcaattccaacatcactcaactgagtcgtagtatcgcctttgtccaccatacccgcatttacacagatccatcctgtggtgattccatcatccttttcgtcgatcatagtgcctgctgcactggcagcgcgcgctcgcttggctttacggcggagtttaattttcaactcgttgcgtccaagtaagccgtcggcgtagggagacaatttgtattggcttctcagccagcgacagagacgatccgcggacacgttcaaatgcttcacactgcgagcagttccaatgatcatgatgacattggcaccgagagctgcagggatttcgaggccacgcaggtcaaaaagcttgaggccatccaagcccaagtccttatacgtatattccaatagagtcgagagcatctccggtgaaccttctggaattttagggagatgagcttcggccaacgggcgctctttaatgattggcgccccttcctgcagataccaggggacatgctgtgatgaagctggcgcatttgcttccgagtgtggtgatggctcatctgtttcggatagaagagtatcaagctgattcgaagttggagggcgatcagatcgcagcaaagttacagcggagaaggctctagggttggagatcgaacgggaggaaagaggagaggatcgtggcattgggatgccggagacggaaacaaaggaccgcagcacttcatgccgacaagtctggcatgcagcccctcgtaaaagagctctgctcatagtgatggttatattggaagaaagaaatgcggagcttgagttcttccaacaggtccagttcttgatttgctcccagtgatatcagataacgggagcaaacactgcaaacagctgagtcatcaagaaaaaaaagattcgggtggggggcaattatcacaaatcgacgaggctgtgaatcttcaataccctggtgatttttcattcttgggttctgatttccgactatactcatcaagatgtcgatggatctggatgcccccgtctattttgcgcagcaggagaaagtcgcagcgacgtgagttcttatcgcaactttgtttctacctattactccccaccttctcaaatactgatacttcatttccctcagaattctctgttgcaactgtggcgctgccattgatggaacactctcagctggagccctatgttcggattgcattcgtcttactgtcgatgttgccggaggtgtatgtattaccccgtttgtgggctcaaaatcaaaagaagccttcttacactataatgtattccaactaacatggactttaggtgcaacgcgaagcggtgattcactgctgcagagattgcgaacggtggctgcagccacccaacagctgggtcgtcgcagctctcgagtcgaaggaactactcgccatttgtctacgcaagctccgtggtctgaacaaagtccgaatcatcgatgccagtttcatttggacagagcctcattcgaaaagattgaagctgaagatcaccatacaaagtaggtatccaccaattcagccaactgagcacatctagcccgcgggatcgaagctaacaacctacaagcggaggccttccaaggcactatcatacagcaacaattcgaggttgaatatgttgttgccaatcagcagtgctcagggtatgtccagttataaaccccccataacggttaatatactgacaccacctttttttagctgccagcaaagttacacgcacaacacttggggcgcaagtgtgcagatacgacagaaggttcctcacaagcggacctttttgtatctggaacagttgatcctcaagcacaacgcccataaggatactatcaacatcaaggaagtgaacgagggacttgatttttacttctcaaagaggaatgaggccgagcgcatgctttccttcttagagtctgtggtgccttgcaaaaccacacgatcgcacgaactcgtctccatggatattcatacgagtaagagtgtctacaagcactcgtggtcgtaagttttcccagatccaactcctcgcgcacacctatctaacaaccgcatttaaaacagcgtaactattgttcctatttgcaaggatgacctggttgctctaccgattaagctggcccgctcattgtctgatataagcccgcttgctatctgccaccgagtcggcacttctattaaccttatggacccttgcactctccggacaaccgatcttcctactagcacttactggcgccagccattcccgaatcttgcagataccaccgagcttaaggaattcatcgttttggacattgaatccaccggtcattctaatggtcgttaccttctgtccgaggccaccgttgctcgtgcctcggatcttggatctaatgatatcacctatttcacacggactcacctcggtggtatcttacacgtgggtgattccgtcctcggctaccacttgacgggaacccagttcaacaacgatcaattcgaagcaattgagaatagccaccagtacagctcaacaatcccagatgtggttcttatcaagaagcactacgtccgcagcaagaaatccaaggctcgcacctggcgcttgaagcgcatggctcgcgagcacgaggaggaggcgactgccgctgtagtcaatgttcctacaaacaagcgccaagagcaggagcaggctaggatggaacaagattatgaaatgttcttgcgtgacgtcgaggaggatcaggagttgcgtcaaactcttgatctgtacaagaaccgccagtaccaggtcagggcagaccaaatggatgaggacggcgatgatgacatggatgaggagggacacgctgtgccgaaaatcaacatggatgagctgcttgatgactttgatgatttgaacatggaggacaattagtagcaatctggattttatcatggatgatcatgggactggttggcgttcgtgttttagggttttttcaatcatcaagaaaagttgttttttttttcgaattgatgcatacaatgtacagcatttacttctggaacagatcaattcagatgaaaatggatcaaggaaagagagacgagagtatgtagattttatattgtaggaggcagtttctaagattgtaaggctacactttacaatagtactacggaatggcaatattcgatcataacatctcagtgaatgatatagaaatccgggctgtagtagatcaaatagacaggccagaggccataaaagccaataaaaacaagacgaaatgttccccgtgaaatcctacttagaagatcttcccaagtacccgcttcgcgtcctcggccatagcaccatccttcgatccctttacaacctcattctgctggaaatggaaccgccttctcgtgggctgcttgtccttcttaggctgcagttccttatccccatcgccagccgcctcaccagccgcctccaagcgcctcttcatcttctcctcattctttttcgccatgccatcagcaatgcgaccactctcaacacccgcaatgaacattttagcttccttggattcgcgagcgtcggcaatcttcctcttgctttccctttcagatctctctcgttgtacagattgcataagatcttcccaggagtaccgtgagagatatttgatgttccacacatcatcgtgataccctatagatcgcagcactggtcagtattcatcacttatataagggcgaaaatgccagtaaactcacagctcgacttcaaaccacccacgatagtcgcattcaaggtctccgcgcagatcttggccgtctttttggagtcgaactcgatccacccttcagtgtagagctttctcttatttgagcggtttcgatggccggctgcagatgggagaagaggggctaggaagatctttgtgatacctccgaaccctctcttctctagcattgctttcaaggcgaagggtttcaggtacggcgggagagaagagaagtatatgacacctgagcgctttttcttaggttctttgccgttcgcgagtttcgacagcttggcgagcttgccctttgctttgagcgacttggctgatttggtgttaggttgtgctgggtcttttagacttgtgccaccgtcttcgttgtggttatcttcgtcttctttctcggcatctttgtcgttttcctcctcttcctcgtcttcgtcagactcttgcgtgaaatcttgcgtggttgtcgtccgccgccgcttcacggcccgtcctttgctctccaccacattggcttcagagtcgtagccgcggtcgctgccgctggcctcatcatcactggccgcaatatctagaaaatcattgtgtttgcgagtcgtcattttgtggaatccgactagggttgacagacttggttatgggtggcggaagtctgcaactttttttatgcgggtggtctgtgccctcggagtcaagccccggggccgttccaaggctaaatctactaatcagccacacatgagccacatggcaaagtcaaagagtccagcttaagaagggtttaagatgaaagaaattcttgaaattttgtaccggtatctcgaagaagccattcgggctctgtatgctgaaaagaaccctcccaatgtatccacgaaacgccacagagaaccagtataagagcccgcatgatatatgcaaacaaagggcaaaaaattgaatatgtaacaagtctaactaatgcccaacgatcccttggctcgctcataaacgtagaagctcactgcaaccatgggaatgaccttggcgtatccgatagtcagtccaacccagaagcctctgaaccctctctcgagccagattgcgcgggcggtttcagctattccaagtcgtcggccatcgccaactgcaccactgacttgcatccgccgacggaggacctccaatgggtatgatgaagtctgcgaaactagaccagccacagcaccagacagaagctcgaacgtggtattgagctgcggtcgtttgggtcgatccgcggaatgtgctaactcttctggtcgtctgagggtgtagcgcgccacactggggagacggaataagtcacccactgtgtcatgtgtgaggaaagacattccggcgtaggggagcatgccgaggatagtcggggagaagccgcggtagaaattggcaatgccggagcgcgggaaaactttcgaagcagcagctgaagcgctttcggcagcagcaacggaagaagactcggctgccgcagcagagtgggttggtgagggtctaacacgctcgtggtagatttgccgccatacgttcaccaagcctaagtgtttcgactgtctggtttcgtatgccattcgcacgcgcatcagttctaatgggtatgtgaaacatacagaggtgacaccggccaagctgccggagatcaatcgccggaacggggtctcgaattcgctggaaggaatgaagaccgcgcggatctgctcgtatgcaaggaactttatagcggcgtaggggaaaattcgaaggagggtcactgagtggcccttgtacaggccccgggtaccttcattgcgtttgatatctcgaatcgctgaggccaggccagtccagctgcccgtatatttggcgaattgggggttcgacgactggaataggatcttcacgcggtctaggggcgctaccacggtcttagcctgtaatgtccggcgcattaattagtataaagctcgtaatgacctgtcgcccaggaaacttaccgcacaccctgccagccctcccgcaattccactcctcatcacataatcaaagctacgcttttcaatcttgtttttgccgctttctggtatgtccatgtcggcggtactatttgacttaaatgatttcgtagcgccgccgacaggcggcgatgccgaatgtgcgacgctcatcggagcgaactgcggagtagagtctgggattttgggagggtcgtaggcatagtccaaatgaccagtcgacatggaataggaagaggaaaaggaaagatgaagttgtaaaagagcaaccgaggctggtaggagggggaagaatatccggggcgccctcgtgatcagtgtcggcgatagtgagatttctggggtaccggatgatcttctggacactgcaactgtacacgcaggtctaagagttggcggatagcactctaagcttgagcggagtttcgaggaatataatgacagtgtaatggcaaaagatgaaagaataatagcgttcggtgtatatttccactgacgtatttacgaggttcattgtcgttacgaacattctgacgtgccgataccagcggctccccgcgaataaccggcgggttacggtactaatacggcccgcaaaatcaacgagtcccgagatgccggtttgtcatcgtgttttgcatccactaggcccaattaggacatggaaccgatatctatcggggaagaatagttacttgttctatgttattgcattgcttctaagctatttgactttcttccccaaaaaaatgctagtgaaaagagttgaactccccatctccatgcagctcgaaatttatacgaaatacaagaatatcgtggtcgcgtgatattgtagaattaaccctctagaggcatcaacccttgcgctgagagcgtgttcgagtcaaaggcttagcctgcttagcctgtttggctaccttggtcactcgggcatcatccgaaacccgcttgcgcttggctggcctgccaggatcaacatgaagatgcccattctcggacaacgcggtcgtgtttctccagcgcaggcagcgaagcccactctcgctcacatccagataggtcttggtccgggtggtcacgcgcttggctgggatatcctccgattcggctctatcaggcatatcggctaggtacgccttgcgattcttcatgtacttgccgatgtactcttgctggacgagcagctccttaagcaacttggactcccggttgccgcgcgagtccagccactccacgagctgttcaattgcctcggggtcctcgtagtagccccattcacgagcattccacacatgtgttgccccttcttcgtgctttttgcgctctgcgggggtggtttggaaatgcttctggtactgcttccgctgttcgtcggtaacgtcgatgaagccggcgcgctccatttcatccgggccttgcacccacagacgaccattggcgtagcatgcctcggccgttgagctttccggcataccctcgtagggcatcgcattgcgctcaaaccaccagtagcgattgcagaagcgatccattccaaggcatcgcgtccgggggcagtcggtctcgcgaaggctgttctccacagtctcgatctgctcctggagcttctcgatattggccttctgctcgtcgatcttcttcaagactcgctggtattgtttggaccccttgggctgcttcgccaacatctcctttcgctccttttccaattcttgtttccgtttacgctcgagggcccgatcaattcctccgcgtaatgagcgtggtcgagggatatcctcgtcttctgtgtccccgaccatttcagaatccccttccagtcgagagtcatccaagccgtcaagttcgggcaccggcgtaggtgacttcccagccttttcaagctcgggctggacggccttgcgctcctggtgcagctgacggagctcgatgagactggaagatgatgttagcggttgagatggcaatggtcaaggattgacttaccctgctttgcgcgccttctgatactcaattttctccttgcgcaactctgtcatctgattgctgcactcttctagataatttcggatggccctggtctccaagctcaacatacaaatcatctgaagcgcctgagtacgcaaattgatgtcaagtgtttgatactgctcctgcgcggtgtcctgtgtaggctcgcgatcgagaggcgcgagatgcttaaggatggtgttgcagacttgctccaagcgaggacgaacagatagctggtgcaaaagtccaaccatcaccaactgccacccaccgttgcggaaatcgcgtttgcgaagacgatcaatccacccgtatgtctcaaacatatcgccggcgcgatgaatctgtgtcttctcgggttcatgttcgttaatctgtgctttgatgacgactgcctcttccttggccagacttcctctagtggtcatcctcctgggcttcggctgcagctcgggagactcttcctcggcttcttccttttcctcgtcctcttctgattcatcagattcatcggcagggaagtctgggagtgagatctgaacagcaccatcatcgtttgatgaattgacgagcttcttgagaacggcgcaatgcacttcaacgaaaagctcgcagtccacctcatctgatgagaaccgcatagcttgaataaaatcgtcaaaggtgaaagaatccagttcaaatacttcgcagtagacattgagtgtgtcccaagtctccaatagcagccccaccgtctctggatctagatcaccgggcagaaggttctctgtgccgtcatcttcagactcacctaccgtcataaacttcagggctggtcgatgtttcttttcggaattcggagcaaggtctagatcttcgataggatacttgattggtggcggggttggtgctcttggctcattcttaatcaccactggtgggagtccagccagcttcctatcgccaaccagtggtggtttggaagggcgcaacgggttggaaggcagaaggaatgatgggttaccattcagcgaccgctgatactcttggtactgtgcctccctcgattttgccatgtcctgtgcagacagtttcgatttcgggcccttgactgcgggttttagctcgggcagctgctgagaagaaaagaaaccaaagaagccatcttggtccgctttcttcatcgccttcttctctgccaccttcgcaccatactgcaggtgcttaggcacctcaatcgggatcttgtatgtctctgcgacggatggtttgaccaaccagggggcacctgtccacgactctctggtgacgttgtttttgatgaacccgcgcagcatcagtttagtgaaagcctttcggtcgcgtgtgatgtggtcctgatccagcagagcctcttcgttttgccgatctaggatcttgaccagatacctagcaaaagccggtgttttaatggttccatcggcatataactgctctgcaaagttggccttatctctgatggtaccatgaagccgactactatcctcaagcaaaatgagaacggcttcgcctgggtagaagtctgatttgaattcctaggtttgttagatcagtcgttaatatgtgacgggtattatctcacttcatagatttcatccactaagaagagtgccgttagcttgattcggactaagaaagatcagaatagcatacccaggctgtccaccctcgaaactatagagaactgaattctgcgcagaatgggttctctcagggcatcggggaaactgttgttgacttcacgtgattcctccgtctagtcgagggttagcatgtgtccatcactaggtatccatgtgataatatacctcactgcggagcgcctcaaaaaaggtcaagcccgaatggcctgtgatctcgcagatgaatcggcgttgtttgtagaagtccattcggtgaaggtaaggctcgtagctagtgaagacctcattggtctctgggataacccagacctggaagggagaaagagtcagcgagaagctctggagtatggataatagaatacacacctcagagctatcatcttcaatgacagtttgtgggaggtattgaaccggtttgcgtttgaataacacctgtccatgcaattgtgtaagcctctttgtctccgcggcatcgaccactttcctcttggcgcctccgcagccattccatcggataaggtaattgcataccatgatgctttaaattaaatgtgcacgcgccagtcggccaagagctaccgtaaacagaatcgagaatcgaacatgaacggggctaaaccaaacgcgatcttggttagcgagtgaagcttgtcggtcgagtgtgcgaaggtagaggccgtgtcggccacgcaatcggcggagttaacgggagttgcgatatagattgcagatactccagtcgctctgcaccgttgtgtagaaaatgggcagtggaggggttggtgggaatcgtcgtgatcaggcgtggtcgcagatcaagaacacgcgaacagtggaatagcgatgccttgggaattcatgcggacttaccggagtagaacgcgtcttgtactgaagttgcgaaccaagcgatttggatagggatgaactggtggaatctcaaaagggggagggaggctgtgaatatttcaaggtgtagggaaccagaaagaagaaaggtagacaaaaaggacggagcggtagatcattgcaggaccgcgaatcagcggtggacgctgattggtggagaggaggagcaagcgggagccaaagcccagcagaaaaaccgcacctgggctttcctcgggaccctcgactctccctcctcccctcgtcatctccgactgtcaattctctcttcctttcttccccaactctgcctgtatttaccctcattcgactcgtctggtccaggagatttcatctacaacctgctcgtttcaacattctcgaatctttctattctttaacccgattatcaattcccagtccctattctcggtcacctcaccgggctaagatcgggacaatcaattcgaactaacgggaccatgtcactaccagctttgtttgtatttttagcatgaaacaccaacctttcagttggattctctttggctttaaatgctgaagtcttatttgttcatacccctaggcatctacctaggtagtcgtatttcatgcttaaattagaactagatctatttaataactatatgtgactgaaatgcaaatagtggagctttacatacatactctatatcatgtactgtctgctaaatatacatcatctttatgactctaaggcaagcagctatggttggcatgtaggtttgatacacctccttcagccacggtgtcacaagcgcattgatcacccagatatctattgttggataagagatactctatatatttgcttattagagacaataagcctctctttttcatgtcatcataccgagacttgtgattgtttagttatcgcgcggctagtcgtgaatcacaaacatgcgatatgtgcccaggtatagtcgtccctcctatttataatttactactttaagaacgggttgcatatgagatctattaaaaagcagcctaaaataaccgattaattactagtagaagaagtgaaagtacatagacaaaaggtatgatcggaaaatgacttccaccacctgtggaaatatataggtctcgtaaatatgcattttcacactagacaatcaaccaagctagtatctaagccaaaaatgtacggaaatacctatgtgtctacacaaacatggctagcaaatccctagactagaagagagatcctcccccatgtttctatctgacctgcatttgactgcaggccaaccatggatgaacagagactaactagattgggcttagtgagaaaatagactccgtgatccgtgggtctgatccacgtggaagcaaacaatgcaaacattctactcctatatcgaatccgagtaaatcccgaagtcaccacaaataaccacaagcagtgtgtagttcatagttgccagctgaaatataaaagggtcttttgcagctaattattatcaatctaagaggtaaaataaaccaccatgaacccaacccagcttccgacgacgccgagggcacaataactgctcatgaacatcaatggcaggaactctagccggtcccatccgaatatcaattggtgccccagggagcagtagataatcagaggaatagagatggtcaagtagagcagcgaaagccggtcgaataggaaaattcggggccgctcggggacaggtgcgactcggtcgaagacgaaaaggaacagcaccaaccacaggaccgtataaatagtcttgagggggaagtcggatgctgtaaacagcagcgggaagagcgaaacatggcccgcaaccgccagaggtcggaaggcgctgaagtagcgacggtccttgagggcgatgagactgaatgggatgataatgaggagaatagctttctcatgcacatgccaaccaaagaggaatgatgcgtagccacagagggtgatcgcaccgacaaaggtatcccagcagcctgggttgaaccagaccttgacgagaggaacctatgcaattgtgagagaaggccaaagggacaggaccagggacacataccagttggaacaagaaggttaatatgaaggtatattcctttgtaatctgcggaaggacggcaaaagaggtgtctcccaccagtcctcgtgtgacactattcagagcagtagtgttcacgggcagccctagccgtggagcaactgtagattttcatataagctcatatgtcgtgtgcgccgaaagagatagaggctacttacgggaaatcaaggctcgatcagcgaaggagtacatcgcccagatattcggtgcccagtacgcatgacacagtcctctcgaaaacggaaacagcctatccttgagctgcagcaattgtccccattgtgcaaatggcccaaaggcaattgcaaagacacccaccacaccaactccaagtttgaaaatattaccgaatcggggccggaaaaccgatttgagactaaggcaataggtgcgcagtagatagacgaagtaggcgagggcaaggtataggtatatgtgcttcatgcatagcagcacagcaaagaggataccgctgtagagaagagtcgattgcttgcgagccaggacgattgataggatcaggattccatacatgaaaccattgtattggaagtggatatgatcaatgatgaggagaccgggggatagtaggatagagagactggctacatgcgcagcctgcctgtttggcaaaggaaccgacttgacgaatctatcgaactgcagtcagaattatgttgcatcatcagaaaaaaaaaagccaaaaaaagggtcagggtcgacgactgccataccgactaagcgcatagacaagaaccaactccgtcaaaatcacggttgatctttgaaagtagacggtctgccaggaatcatagccaaggttcttcacgatcagcatcgcagggtctgcgtatacagcagcctgtgacatcagccactcgaaggctgcaaagaacggtgggtaatcaagtgtccattccgaggatttctaaacccgaagtcaacatcccatgcccagaatcatgcgcccgaccgaacatacctcgtagtaccactcttggatggggagagaatgagtgatggcaagccaattgcgatggacctcaaaatcggtcgatttgctgcaacacaaagaaaagcatgttagcaaagctcatatagtaacctcaatgttgtattcccagtccctttaagtcccccttgcagattctttatagtgattgtttgatatctttccacctctccttccgatcttttttgctccggcgaaacgagcgggacggactcactatgcggggaagagcagcaccttgaaagcagctgcaacgatggcgcattgcgccaatgaagggtataggtcagccattggagctcctgcgcatgatggtgcagcgatgttgaaagccgggaagacgcgagatgggagaatgcgcaaatcggtgaagtgagaagcttcctccgcacgttattttgaggccacgtgatcagatgcggagatcggaggtcaaattaggagcgaaacagctgggcagaaggacagataagtcaatacaacacatacaacgctcaaaggaaacactgtctccgtatggacttcacagacgtcggaatccgccacacgcttctcaacagtgtacagctccatcactttatcgatttctcaccgtcggccgctgttattgcaaaggaggcccgtctctgcgttattgccattgttgtcggttggatcaccacaagtgttgtctccaacctttgcaatcggaagtgtaactgtgactcaatccatagcaagcgctgatagctgctgcgcagagcttccacgaatccatatcaacttcaagcttcaccaaccacacaacatgatgagaacattagcttccctggcattgcttgccgtaggggccacagctcaaattattgaaagctcaagcttcggcactggccaaacgttagtataatgtccacgctcagtctttaggttatggttatctgaccttagaccaggatatcaccaaaccaagactccatccccggatgggcaattggaggagagggccatgaaccgcacgttgtgagtcagcctataacaactgttggagaattgctctaacagctatatagctatcagacaagctcatcttaacgccaccgtaccctggaaacacaaggggatcagcttgggcacagagtccgtaagtgaaaggcttcgaaccgtgatattggacaccagatactaacatgagtatagagtctctcagtcggaatggtcagcagagctccaattccgagcaagcggaccagaacgagcaggtggaatcctgcagttatggtataccaaggatggccagtcccgtattggtacctcgagcatctatactgtcggccaatttgacggatttgctttagtaatcgatacgcatggtggaagagtgcgtattaaccctgtcgcgtattgtcgtgccgtattgatcattcgttactaacctctcctatagggtggtagtgtccgtgggttcctgaacgacggtaccatcgattacaaaagccacaatagcccagacaccttagcctttggccactgcgactactcctaccgtaacttaggccgtccatcaattctcaaactcaagcacaccagctccatctttgaagtcaccgttgacgacaagctttgcttttcaactgacaaggtatgtatacatcatgtccccatgccgcagccattgtaaatatactaacctgagtaggtcgccctgcccgctgggaacactttcggcatcacagcagccacccccgaaaacccagactcatttgagatcttcaagttcatcctcgagtccgccgcaggccaaggctcgacaattccctccaaccaaggcagcaccccccagcagccaatccccgatcaaattcctaaccagcccgcccaacccatcatcaactccggtacagaagccaccatgaacggcttagctgcccagatcgccgacgtcagcggtcgcatccagcttgcgggcaaggccaccaacaccatcctccaggagctgaagaaccaggcccagaaggccgaccagcgccacgcagagattctccagaagtccctggctcaggaccgccagctcgcccagttcgacacccgactcacgcgggtcgagcagctgctccaggccctccagaccgacctccagagcaaggactacagtggacgcttcaaccagctccacgagacgctgcgctcttcccacctcagcttgagcgagaacctgcagggtcacctgcggagtggtaagttcacttgcttcgttcagacgatatattagttcactctgctaattgcttttctctcatctcatagtcattacggcctccagcccacgcatgggcttcttcatcttcttgctgatcgcgttccaggtgatcctcgcgatctcctacgtcatctacaagcgtcgccgggccaacatgcccaagaagttcctttaagcgcctcatcctgtctaaccccccacccaccctgtgccatctgaatctgtgtcgtcttgagttattgtgtgatggggagtggggggtgtattcatagtattcgcaagtgtgctctgcccggaggcaaccgggatttattcttacgggggaagttatgtagagtacgaatatcattacgttgatgaaaattctctcagagtaattacatttacaagtaagagaaaagtgagatggcaaatattcatttggcctttggcccatgctatcgtacactttctccgagctacccggccacgcaaattcttttttttcagaaaaaaaaaaagccaagcaagataaaaacaacattgaaagaaaaaaacagaaacgtggccaggcagctcggagaaacagattcgagaaaattgacgatcgccttttcggcgaccgggaaaatggaaaaaaaaaacaaatccatgacaattcaaaacgccgggtcctttgatgcgcgcattgaattaaattagagccgggaggctcgctcacttggacttggtgtattggcgcttttgcgcccgctctccggctgatccatggtcatcagcgcgagatcgcttgttccgattgaacacagggatccgggggagaagctcggagtccgaatggtgggactcggcatccgaagatgcgttgggagggtgagaggtgccgaggggaggagaggtgggagcatgagaagagcccaaggtagactcctcgtcaatgcgagacagaggcttctgagcaacgggcgaggtaggcccggcagcttcggcgatgtgaccttcgccgacagcaggaggctggcttgtagccatgctgaggagagtagtggcagcgtcgaattcttcggtggaaacaggagcgccagctatcatgttgttaacagcgtgagaaacattctgggtgaactccgcgggaagaccgttctgtgcgatgttgttggtgatcccagcgttttcagcgcggttgaggtaatcgctggtgagttgcttggtcaactccaagcactttcgctcgacaattcgtgcatactccttttcacgttcgtgatgatcttccttgacagcagtgatgaagttcaaaacgacatcgcctccgaggaaacgggcccttttgtctctccagtcttcatcaaacaaactctgatttgggtcgtcaggaagcatgatgtcacaatcaatgtacgccatgttcttggttcggcgaacacggcgcgtacgctcgttgctgccattaatctccttggtggcaatcatatcgtcaggagtgacatggttaggacacatccacccgaccttggggttagggggatgtgcgcggggaggatcaagacaatccagatggaagcggcaaggacagtagtcgcaagtaataatgggatgtataccttgggatgtaaaaccacacttggagcaacggatgcagtctcccttgttgtcgtattctcggagaagcatgggattcgcgtaaatggtagggccgtcttgcttcggtgctttagtcagccgcggcaggtggggcgcggccttgtagtagcgttgatgctttaaattccgggcatagtcgccatcaaacacaattccttcatccactccatggaaatgctccttgatatcctgaggaggttggaactctgtcttcttgtagtgtttggagtgtgcaatcaaggtcgagaagctgttgcgaatggagcacttggggcaatgccactctccctgcggaggattcttgggatccaagggaggatccaagcattcgaaatggtatgagttgatgcatgtgtcgcagcagagcaaatcgccaccttttccacattggtggcagtcgtcgctgttctcggggggttcactgtaaggtgtcatattagcatagaactagccgagtcacaccaagaaatcacatacatagaattcggcatttggcgtgcttcatggccgccagaccaatcattgaatcggaccgagtaagcagaattcgaaagtgacgagagacttgagactgtggtatcaacagacagcgaccgtgcacgctgtgggacctcagggcccttggccttttctctctgacgtcgcgagacgggcttcccagtcttgcgagcgatagccgaagcaccatctgaatagacagagggagccgtgggctccggaccctttacaagaggtatatcgaggattgaacccggaacagggagagaacgcgcacgattgaacgcgtcgatgtccccatcgatacccgcatcaatgttctccatgtcgtagggatgctggattgcatctggtggaccgatctgagttcggattgcactgtactggacaaccgcctccgagtaagactctgcttcgagacgagcacgcacagcacgcatcttttcctcatgatcaggatccatttcccactggcgcttacgcttgtaggcattctcgttgacgcggcatggcttcttgggcctcttgagcggagcggtatttgatttgccgctcaggaagttttcttcaacccgaggaccacttgtgtcgcgatagatgtcggagaccttgaagctaggctctgcaccaacagaattgacagctggctgacttgattcgctgcaggaaggaatatcggctgcattggccgtagagcgaacgtatttctgataccacctttgggcttctatcagagaattgttaaggatcgtttggagagcaagttgcaactgtttgtctcctccgtcattttcggagaggttggcaatcaaagagagtttgaattcatcatccatggcattggaccagaagtaaagaaggccaacgacacaccactcgttgtcgttctcgattgagctgattatggcgaacttcatgacgccccgtagtttgacaagatcatatttgtcggagaggcgcaaaggaagagacatcagcacggcgaggtacttgtgggtgatgtccgcgctcgggagggtaggagtggccgcatcggctggggtggtgctgcgaatagactcatcggccacggtctcggccccagtcgaggttgaggcaagtgccgcttcttcggcgatttcaacatgacccttgtcagtcggcgggctctcaaccccgctaacgggggaaaggcgctcagcttcgtcgcgcgggacgttggtcggcacggtcgcgacgctgtgggcccgttcagacggaggagccacgccagcagctcggtactccacgggcgatgggtattccccaatcggtttcattgtccgatactgggtggtgggcttcgaagtgcccgggggcttcttctgaagcttccgtcgttgcgcgggtttggaagagctctgacggcgttcggactgagtggaccccgtaggggcaggcggaaggggcctggtagggttagtgccacgcgctccatgccctaacttcctggggtcaacgtactgggcagcaacagcatctttcttttccttcgatgccttgtcggcttcgcctatttgaataagttagtttttgctctcatctggaggtgagtaaaaaaaatgtggggtaatctctcagtttcacctgaaagatgcaacatctcgttctccctcatctcagaagtgatcagtgaccagctcatggagatagacagagcaagtgtcattcacatgaaagtgagaaaagggcaatgatgttttcggtcatataaatggctggacttatgaggagggagagtatgttgtctcatccactccagaaccaagtgacagagcaccccgtctcagaagtgactgggccaatgacaagacaatttatgactcgaggcaatggcatggaaaggccactcatctttggtcaagaaatgtgcaggtcgagaggcagatgaggtgttgtatctcagtcacaacgggagcagagacatggtgcatgagacagggtaatgggatagggaagcatgatacagaggagcatagcatgacacgaagtgatctttcagcttgtgggagaccgcgaaatccgcttttcagacgtgactggatttcaggggaggggactaggatagacggagaaatatcacttactcttcttgctgagaagacgctttgagacgcgtcgcatggtagcacgcacggtatccatttttaacgatgaaagtaacgaaatggattgaacgtggggaagaagagagaagaaaggaagaagaagatgggaggttggagggattaaatactctgcgagaattgggggccttccttttgagtcggggctattgagagtgcaaacaggaacaataggatagacagtccaggtgacatgtcatgtcacgtcttgacctcgataccctattcttccaggatgcctacagagaacaatagcttttatattgatctattgatccattgatctattgagtttgcctgtgtataaaactccaatggaagcattggctctctattgtccctaagctgtgtagacaatctgccaggcacccatgcaaatagacaggctctggattgaccacagaaggtgggtacatgtctcacgaggaaatgaacctaggatatgatatactcttcagatacgctaagccgtggtttggtctctagggattcagtagtttcagcagtcgacaggaatgaggcagagatcctgattatattgctgcaccaagactctacacagactgccaagttgtggcagaatggtcccctgttattgctagcaagtagaaaacacctacataggtagcttaggtgtcctaccattccataattcgaaagaaagccacggaagactcgcctaccggtattaacatcgcccttttatcgaatagtcgacgatgaagtgacgtgtacctggtttcaatcttgcctcgaacaaattacacattgagattcgacatgacatgaaatacgaaagtaatagagaactacaatagctactgtctcaatagaatgtcttcaaatagatttacagtacacacgagtacagactggcaacgtcttgatttggtccatggagtctgctccaattgctacaagacagacaggcctccgaggaaaagcgcaagaagaagatattccagcaccaagctcgtccataaagtatataccgaggtttccaaaaatgggttggcattgccagccctgtcgcgtgtcattggaaaaatcaagtatttctcttttgttttttggatagatttcgtatgacctgcagtgaggctcgtcattggatatcttttttgcattcagattggacaaatagtcctacactatatccaagtgtattgcatgaagatgatgaccaggggaggttgttgagagcgttgactcatatttactcgtcaccgccggtggtcttggtcttcttcttgctcttgttcttcttgttgccggtagagcgggtaaggggctgctcgagaatcttgaggatctcctcatcctcaagcttcttgtcagacttgatctgctcgagatcgacgggcttgggagcggcgagcttggtgagaccgttcttggtgatggctgtgagtggggttagcttatgggtccaaatcatcttcacgcaatttcaacggtacttaccaacggtggtcagcagacgagagacgggggaaccgtcagtctcgccagcaggctcgtactggcgaaggacaccgccacgaacacactcaacaacaccaaccttggcggccttctcgtcatcaagctggcgcaagctgaaggggaaagtaccgaacttcttgacaacctcagacagagtctggcgggagctagggcgcttcaggccgtaagtggtggtggtacggcggtgcagggtaggacggtgctcgaggttcttgaccttgccggatcccagactgaggccaacctcaacaccccaaacttcgccgacctcggggacaccgtcaccgcggacaccgttaccgggggagagaatgatcttcttatcgccctcaatctcgttgcggccgaacatccagctcgtggtgttctcgacgacattgcagtcgtaggtcttggcgatcttctcgagcagagaagacatgtaggcctgagtaggggccttctgagccgcggccttcttcttctcctcatcggtaccctgagccaaaagaccctggggaatcatgaggcgcaggagaacctcgttggcgtagtgagtagcgataatgagatcagcctcacggccggttacaggctccttgggggagtccttcttgggaacgacaactgtgtcgcaaacgatggttccgaatccatcgatctgagcaccaagctgaatcttgacaacctcgccggccttcagggcaatctcagcctcggcggcgtcggacaccagaggggtgtagggagtcacataggagctaggagagacagtcgtggggtgagagatacctaagtttatatgttacggtaagttcatgtggtttgtctgccactcacggggttgagagtggggttgactaacccttgacaatcttcttgcccttgtagaccttggcgatttcctcctcaagaagcttgtcacccttctggcagatctcgacgatcttctctccctccaagcaaagagctacgtagatattagatcacaatgtgagacaataggaagttcttgcgcaacataccgataacagcgtcaaggacgttgtgagaaatttgcgcagcggtcttgtacttggtcaaggtatcggggttgttgagggtgtaatctagaaagaattgcataattagtcatggtctatgagccgaacgtatttctttgttgcggtgagtgccagcgagctcatggcccatgttgggctcagtgcccacaaacgtcagagctttccaccgcgatggagtttacataccaacaacctcgggtgctttgtcttccgccattctgaagtgaattgggctcgtggagctggaataaacaagtaaatgcaaatggtttcgcaaaaagagttcggattgtaatccgtgtgaagctcgaggagaggaataaaccgagatcgagtcgtgtgcagagcgtcgaggcgtttagcgttggtggggttgggtggtggtcgcctgatgtttcaggcctgtcacctagggctttgccgaagacgtcatggaaatctctcccttgacttcatactgagcgacgttgattcgcgttaagaaaacgtgtaactacagtttatctaggtggaatccatgtttctttcgctatctagaccgtaaatgtctcctctaccccggattccgccacaacccaggatcgcccagacttccagcctccaaccccgaacttctcctcacctgaccagtgtttcccctcttaaacattcctaggaagtacatcgatgtactcgggcttttgcctttcgaaacctacgatccttgctatccgagcgctgatttcataatcgaagaggccaatatgcaacttgaatggatttcgaacattaaaagactcgagtatatcaactgagcccatgccagtaggatagcagaggcttatttctcggagaccaagacaaattggctcagtggcggtgtgaatgtccagctggagatgaaatatatatttagaacttgattttctcttttcgatatatttccgcccttctctctagtattgtagccataatgttgaatcactagccgccagctgtagaatacctgtgaaaagcacagtgactttcatgattgaataccatacctatagtcatcggtgcatcgaggtgactgaaggtggttatactataacttgcctcaggcatagtaatagcctgaggcattgcgacattcccctcactcgttgtaaacccatgacatagaactatccatgtaaccacaccgttgttggttgtttgattctttattcttctgatttcaacactatgagttctataaaacttccggtccgggtcttgacacacaatatccgatatgcaacctcatctcccttcaaaggcgaacgaccctgggcagaacgcaagcaattgttgttgaatgaatttgaatacgaggcccgtcattgtgaagaaaccttcatctgcctgcaagaagttcttcaaaatcaacttgaggatattctggctggattgaatcaggacatggagcctggagcaccaaaatgggttcatatcggcgttggtagagatgatggtgacaaggccggggaatactctcctatcatctacaggccatcggtttgggagttactatactgggagacagtgtggttatccgagacaccggaaaggccatccaagagttgggacgcagcctccatccgcattgtcaccattggtgtcttcggtcatccggttagtcggaatgtggtccttgccatgaacacccatctggataatcaaggatctcaatctcgcctcgaggctgcacgtatcattaccggaataatttcggaatataaccagagaagattcccagagatcacgggcactttcttggccggcgatttcaacagcgaatataaccaggaagcttaccaagagttgtcaaaaagcttgcttgatgcatatgagcaaatcgaaagctcgaaacgatatggtaaccacattacttggactggatttgggtacgaggatgagccagcctcacgtattgactatgttctggtgagacccaacggggctgtcggtcagaagtcgacagtcactggctatgcagtgctagcaaatcggttcgacgatggtgttttgagctcggatcaccgcgcggttattgtggacttgacagttcagacttgaggatgtacatagcagaccacgagcatgccaagacgtccaggaccttccgaggtcacattatgtaacacacacgtggatcacatgacaataagtaaaattggtaaacagggtcataggctggcctggagcccatagatgagcattgggaataacctcaaaatatcttaaaggtagtattataccttattttataattcctttatggtggttgggcatgtagagtgaatggcgcgtttctttacgatcttagacgggtgcggacacttgtaacgggtactctccctctttctcctttgcctctttcaccatcaccccggctttaaaacaacagacaaccgccacagcttccgcagtttagaagaatctctcggggaaagaaactcgtcgattgggatcattgcagtcgattgacgaacaaggtcagctgacttggccccaaccgatccggagcggattctgcgctggaactcccgactggtccattcaaggaacatcggcaacagctctctcccccttcggccctggtatgttcgattgcttcccatttgggttcccagtccataatttcgatatgctgtccctattcaatccgtcgcataccctgaagtggtgacttgtggcgtgttcgggacatgcgcccgttgcgacacgtccatccaacaagctacattgcccaggtgacattggatgcacggtcgcgacggcgatggatagggtaatctactatctgaaaacatctgctaatcacgatttgatcgtatggacagattacatcccataatgctacggtagccgacccgaacctatccctgtcgcgttgagagccactccgagcttccaagatcatacgagtggcattagacgttcgttttgcattcatagaccatccaaaatgccatcccctgaagtgacgggtggctcactgccctcagagcaatcattcggggaccctcagtcgggtgtccagaacagctctggcgcgtcggacacgggcgaacaaggttcagacaacatcgaccttgggacaagccgatcaacaaatggtcatacgccagatacaatcgcagagggaaagcaaagcgcaaaggctatgcttgctgcttccggggtgtcagcctcgtcggaacctggcagtgaggtttccaatggcacgccccgttctaatgggacgcatggttccgtaagaaagagatctcatgatggatctgctgttcaatccacagaggtctccggaaccatggccgtacgcgcccgcgaaacgccactggataagattctcctggagcagtacgttgatcgcgaattccagcagtcggccgcagctgcctggaaaaatccgagtcaagagttacaaaagaataagcgagcggaacgcgacttctatttggcagtgcgacgcgaaaatcagttaaacccagcagcattgtatggcgtgggctatgaaggattcggaaacccccgtaccgaccttcgcaatcaacaccctcaacttctctacccaactcatcgacgacgtcccggaaatagaaagacgcgagaactacgcatttcacgacgtgacgcaaagacgcagaatgaacagattgaggatctggtccctattcgcttggatattgattgggagaaagtcaagattcgcgatactttcacgtggaaccttcatgatcgtgttgtgtctccggatttgttcgctgagaagctggtggaagatatgggtcttgcggtagaaagctcagttcctctgacgagaatgatctcccaaagcatccaggagcaggtgatagactattacccgcatcttaacatacacgaagaccctcttgatccccaactaccctacaccgcgtacaaaaacgacgagatgcgcatttcggtcaaactcaacatcactattggccaacacactctcatcgaccagttcgagtgggatattaacgatcccaataattccccggaagaatttgcgttatgtatgacggatgatttatcgctctctggtgaattcactaccgccatcgcccattcaatccgcgaacagtcccaacttttcaccaaatccttatacattgtcgctcacccattcgatggccgtccaatcgaagacccagacctccacacctcattcctccccactcctgtggcttctgccttccgaccataccaatccgccaaagagcatacgccctatctttatgagttgaatgaggccgatcttgaacgtaccgaaatctcaatatcccgagagcaacgtcgtcagaaacggtcaatcaaccgtcgtggtggccctgctttgccagatctcaaggaccgccaacgcacgatacgcaccatgattgtttcatccgtgatacccaactcagtgggctctctcgatgaaagcaatgtgatcaagcgtaccggttccagtcgccgtcgtggaatgactggaaaccggggcgatgatgactcagacgagtttgatagcgacgactcctctgttgactctcctgcgattggacccaacctcgcacagggcactgctcgtactagaggcatgagaggcgcggcatctgcagcccatgcggcgcttcgcgccagccttggacagtctgccacccctgaaccggtgtaccatgagccccgagtctcggcccgaagacagcaataccgagaagagagtgtggatgactctgataagttgatagtgagattcaagatttcgcgcgacaagctggtcgatctgagaaacgggaggcgcattgtctccagcggacaagcatcacgcacgatggcacctccgtctgataaacagtcccgacttcatcctcccccgcgaccccaacaaaccggtgctgttgatgcaccaaaccctccgcagcctggtgtatctggcgtgagtagattttaaccccagtttttggcccatggctgaccctgtgtctatgcagcccccaccacccaactggctggcagctggtctcagcaagttgaaacaatctcaccccaacgattccttcgaaggcgtgatgcgttattccgccgttgataccgaaaccctggcccccgtgacgaatcccaacaacctccaggctggccaaaatatcaaataccaatacctcccccgtattcgttgccacgactgccccggaaagctctacactcccggcccgggcatgacagtggacaattttgaagtccatctgcgcaaccggcagcacaaggagcgggtcgaagagcggctcacaaagactggtggcggtggtaccaactccgatggcggaagtgcgagtgccagccctaggattccggccaacgcaagtccagctctcgggactgcagcctctccctctccagccagtgggtctcagccatagtcaatctcgttcatgaagtgatgacaacggcgtcttgtgtgattatcttgtgtgattacttgtctctttcagatcgcttatattcttttacacatttgatcaattcaatccacctacttcttcttcatactcacgaagcctcccattctactcgtgtcttgcataggtttttggtttttcagtgccggaagcgatctatctttatccatctgttgggacccgatgaatctctggggcgtttgtgtttttcttgctttgctggaccatgtgtgtaatagttagcagtttgagagctggtttgagtcttggtaaatattcctgttcttttttctatggaatgatcttgtaggagtgatctcttacgtcacattgcaggctcgtaccttccctataacttataagccatcgcttcctataaaccaattccgcaggacacggaagaactacagtaagactggacgagatatgagtacgagactaccgcctagtactaggctcactcgtccattttctacgcacggcttcgataatgtgtacaatgcattcaaagaatcttccaaccttagccacctcgcagccgcgcttcttcaactacaatgtaaacaagtaattgagaagcaaagttcagttcatttacagatagaaagcaaatatctgacgggaatacgcaaagagacagatattcgtgagaacttcaagtagaaaaaaaaaaaaaaacaaggcagatggggtatacatctcggaccatcaccgactgcaaggaaacagagcacacgatggggacgaaattgtgaaaccataaagaagataatatgggcatcaggatatgaatatgaatatgaatatgaatatcgacggcaacaatccgcgcagtaatcgcacaacttattcggatctgagaacagcaactagatcgataccagacgtctatgtctcgaagatcttggcttaaaactcataagtaaatggccattgaaggtgtatgtctttgatgaaatgagaggcatggcccatatatgagaattcagctgaggggccgtgccaggcaggtcccatatagccctggaggttcttacccacgacgggaagagcgtcgcgaaggcatggttgtcgatagcttctttggctcaggcttcttgacatcgcccttggcagcagcggcctttccgcttcgattctttgcaggaggcggcgtgggttccttctcgctgacctctggctcatcatcgtcggcgagttctttatcgtcatccgtttcttgggcttcttcgttctcgctttcctccgcgtcatcttcgccatcgtctttttccttgggtttatcccactctgtcatctccatgtcggcatcatcactatcgttatcgatatagctgacttccgctttcgcggtgcctcggacgctgcgccggcgagaggatgtggtcatggcacctccagcgcctccgtcggaagaccagccgtcgtcgttctttgatttccgtctcggcttggcagctgcactgatcgatgatgtggacttgcgggcgggacgagaagacttttccttgcgtgcctttttggccacggagtgtttgccattcgtatctagagactctggttttcgcttcttgcttgatccgcccagtgaaccgtgggtagagttatgcctgggcttcattgcaattcggacgacgcgatctagcaaatcatccaactcgtctggaaggaagttcttgtcggcgacgtcttgggcttcccggtgattgctcatggaggtgaagagagagctagggacgcccatcttcccaggataggtttgtaagatgttggttgcaccggcggcaccgccaagcttgtgctgttgggagtagatatctgcgaaccggcgaatagttgcttgtgccagatcagacagagtgtggaggcgggtggagatctcgtctgatttggtgatgccatcgcggaactgcttgacgcgctgtccgacgtggaaaatcagtgacatgttgtgttcattggcaactgcggagaggtagaaaaggatatattgagagaagtcggtaaggtcgccgagtttcgttgcttcgtctagatcctcagacgggtaatcagggtggtaggcaagcaaagaaaggagacgcgaaaagatcaattccatgaccatagtctgttccgtccgtttcccactagcttgcgcctgttgggcgaagtatgcggctcgggatcgcatccatgtgagcgtgctctcttttagactatgaacaggttcgaaagcaagcaaacaggggacaatgtaccaccggtggctcagatgtgacttctgcaccagtttcttcttcaagtagttgatgaatccacttcgcacctgcaagagtggatcctgggcaaccaaagcgattgcgttgaaatcggatggcgtgagcagaccgtcgcagactgtgctggaagcacacagcttaagcaaggactttgcagcgaggaggcgaaggcgtggtttttgggatgcgggggtatcttttttcttagagatctcgccttcaccgaccactaatttattcaatgtttcgtagacaggctttgcgtgggcacggaagtcggcttcattatctgctccgtccttagcccgaagacggttgacaatgattttcaatgcccattctttagccttggtctcatcatcaactgtctctgaccagttgtattcagagtctggttcgggtgtacgattggtgagcaggatttggttgatggcaatcgaaatgatagcatcgctttcttcgtctgcttctctcggtgcaagaaggttcagctgcgacagagcagccaggcgagtgaggaatcgatcagagccgtacgtccacttctcaacgcacttctgtaccaaatctttcgcatacatttcttttcggtcagctgtggccatgagaattgaaacggcatgttttgcagaatgcggtgatgaactatagagggcatagttggccatagcctggagaaacttgcggtctttggggagtttagcagggagctttttagcgaaaccagcacaagctttcaaaatgtcctcagcactaccatcaccagccaaggatgccttgggagcttgagcctcgaggtctttgcacatttcttggacttgtgcctctaggacttccggattttgagatgaaatttgcttcaacatctcctgtgcagcattggccaatccgttctcatctgttcgggacaaactcatgatcgccggaatgtggctccgattgaagatcaaagacccacagcgatacacgagaggagtcaatgtttctagcaggggagagttgtttgcactctggacccgccgctggagttcctttgtggccttgacaacagtgcgataatcactcacagcagccatggtaaagcgaatgagctggtagctccgtcgatcatgcaccttagcgaacttccacaggtctgccgatgcgcgcggggcatctgggaaggttttggataatgactcaataatcttggacaactgtgtcttaatcgattcttcgtccttatcaacgacaccaccattgtacttctcgcaggcctctaggtaaagtgttactgccgatctcatcgacaattgacgggccaacatgacgaaaaagacccgcctcgctttttcatccaaccctcggagtagggtaagaattcggcggactcgaatcttgtcaacatctgtctcttgctcgggttcagatgtctgactatccttctgcttctgtgattggttcgagttgcctcgggaaagtttcgttttgatggggggatagggaagtggcagaagcgtctcaaacaagacgcggtcgatcagaatatggatttcttgatcattggtgtagaatgcatcgaatatcttggatggtgcatccttgagaagggacacgacgggctccgtattttgctcgatgtcaccagcagccactgcccacatgcgagccaaaatcttcattgcgtgttcacgcacatgaggcttgcgatccttcactcgctcggcaagaatagcaagaaccgagtctggtgatgaacatccaccatccacacatagtttgttgattatttgggaatacccaaattgcccaacagtatccactgcagccacgcgaaccttctcatcaacatcgcggagcatcgaggccaaatttctgacaagactgtattcttcgttttcgtgtagaccagagcctccagctgaggttagtaatattcgccccacaactgtgacccaggcagcacggactgatggtgtcttgtcgagacgacggctcaaaaaggcttcataggccgagttgtggacttgagagaaaggcttaggagatacgggagtcaacaacacattgggctgcggaatggtcttgtcataatccactagtgacactggcgggtaagttgtggggtccatgggaggagggggcgggggacctgcaacaccgattccagccgcgaggtctccgatcgtctgagtcgccaataaacgtagggccactgattctgcagagagctctgcttcaatctgcgggataacattctgcaggacttctggacaagcacgccaaagctcccggatcaggcggtgtgccttactcaattctttgatatcctctccctcttcatcggagtcgtcgagatggggtttccgggcatgcttagagccatttgtttgaccagctggcacagacgcatcgatgatgacattgttaaagtactggctgatgtgactggtcattctttccggacaggcctgacagatagccttggccatgttataagcggccgggtagtctttcagtagaagcgtgtcctgcttggtgtcaatcggcgcatctggtcgctttcctttcttattggagctgtccatcactcgcgggtcgactcggaggaattgggcgacgataatgtccaccacctcgggggccaggacgagcgattcatcgatcacagtgacgagcactcgggtcatgtcaaattcgacattcttagctacttcctcgccggtcgatgctttcgaagaacccgaaacgatgtcgaagcagcccgtgaacagcgggataatgagcgagtccggatgatcaagatcgaccatcaaaaccacactcttgacctcggcgagagatcccaggacgtaaatatgctgggcattgtaggcgttggatgggtcggccaaagcggggattatcgaggacacaatacatgtgaatatatcctgatttgatcatagtcagcaccttattcaatcgcatagacaaaacacatattttgcaagatcttccatcgccacaccttcagttgattgcgcgtaaaaggcgcgtctggtgcgcatagtcgcaatacatcaacgatgcagcacgtagcccatgctctgacgcccttatccttgtgggcaagcaagttcccactggcaagttcctgtgacactttccgtagcgattccttatcaatttcctcctggtcgagcttgcggagttcctgcgcgagagtctggagacgttcgaggagatccgcgatggggatggcggagcgccccacacgccatgagagcggctggttgaaggacagactgcgaagccccgagtcttcctccacctcggaaggacctgggcgagagcgcgaaggcatcgtggatggtcgcagttctcacatggactggggaggtggagagtttcgactcgggagtttgggtggaggttgaccgcccaggacgcgtcgcacgggaccgcgtcctgccctacaaagttggtactgaaggtgtcatacggtacatgctgagatcatttatttactttgaaaaagaatgtcaaatctgccagtgtcttgggcttacaactcatatcatattaattcatacctatctcacctggggcctaggttgcacttgctggtctaacccgggagccttctcttttaggaaagatacatcgctccagagctccttttaagagacaagggtaccctgtataacaaattctgggcattgctacgtatagctgtgaataatctagaggaaataattctggtgaagtttatataaaaggaaatggcggaattcccccctcccccaccaccaaggttctattgtttccgtttagtggatatcatgcgtacgttttttccagctcataacaaagcagcaggttaaataccatttatactcagatacattgctacatgtatatagagacccagttctagagatattaataatattgattaaaataactaactatgccttcagggatacatgacttgtcataaaacaacggagtagaccttctataacaaaaatcgtcggacttcatagatctgtcatcagaacaatgcaagtgaaaagcaaacctctaatgccatatatgtattcatgcgcctgaaaatgagagataggtggatcgaccacctagaacttaggactgaacttgctcatagcgcgaattctcgaaccgtagatgaagaacaaaataggaatggggatcatagcgacagtaatgaaacctagaacgctagatgcccaagccacacctagattgttgtacatttgtgtagcgaagagcggaaaggcgccacccatggttgagcggatgagagtattcgccgcgatggcggagttggcgaacatcatgtacacatcaataatgtagttgagaccctgcatgaagataaccaggatacctagaccgataggcacgccggcaataacctgcggcacccaggagatatttgggttggaagtccagccgaaccagaatagaccgattggcagcaacacagaggcgatcatcattggcacgaggcgctcttcgggaacgaccctgccatgtttttcaagtttgcgcgcaaaacgagtcttcgtggtgtatatgatgagacaggcaccgagcaaaacgccgataagaatgccgatgaatggaagggcagccacgccttcgtgggtccaaccgcgaacttcgccgaacgaaatcgggtaggcctcgaagaagaggtagaggattccgtaaacaagagcgaggtagatagtcatggcgagcaggatgggctcttgagtaagcatctggaagggtcgtaggaggtacttggtaacgatatctgaaaatgtgggctcgtgcagatccaagaaggcgtgaatggccgagttgccggtttccttgcgaagacgggcagctttcttttgcaagatgactgggccgtaggtctcgggaatgacgaagagagcaattagaccgaagaaggaggacgcaattagggtgatccatgcggtccaacgccagccaagagatgaatctgtgatgaagccaccgctgaagaatattagtgtctggatagtgctttgagggatgtctttaaggggtattttgaagagacaatttgagtacttacacaattgggccaagaacaggtcccatgaaagtagctgaactgaagagagcgatagccactgcgcgatcgacggggtcccagatatcagccagggcaccgccaacgacggccaaaggagagcagccaaagacacccatgagaaatcggcagaccaggatagtttcgaggttcttggcgacagcgacagggatctggaagatagcgaagacgaggtagcctgagaacagcgggatgcgacggccgtatagctcactcagcggtgcccagagcaggggacctagagcgaaaccaaacacaaccagactagtgccgagaatcatcacttcagttgatacattgaactccttcgcagtcaccagggtcgcagtcgaaaagacgctggatgcgaaggtgatccacacagtcataaaggacatggtaaatgtgatgatccatttgcgcagattgctgtagttctgggggttgtgagggtcatctttgccatcccagtcgacaaggttgggctctgcattggaaacagcgggcttttctagggtgtcgactgcgttctcgacatctgtttcgttcttctcatgaatagcgttggtgacgtccacctcctgttccatgctgaggcgaggtgtagttgtagttgaatcaaatggtggcggactcatggttgctctaaatacctatgtatataggtgtatgtgcgagacttccgccggtgtgttatgagagaagacaactttgggaaagaacattattgagacaggggccatatgacaatataacccccccccggaggtcccagaagggaataggctcggagctcaagacttccaaagctttgtaaaaaaaaaaggttgtggagaagctcattcggtatcggccgttcgctcctccactatgtccgcgatgtactcaaccccggatacatcagttggaaaagtcagattaaacagcgtcatgatctaggtcaggccaatgagagcctccttttttcatagagtccagtcgatccctaaccttgataatctatagccacctgggcatgtcacctagatgatcaaattatcttgatatacttccatggcgtcagtatatttccatgtggcgacgggtacgcaaaattacagaactagaaaaatcctgaactccatggaagtgggaaatggaccagttaaaagcacgcaaacgtacgaaaaagcacgaaattggttgcagttccggtccaactttcgctctggtcgctgtgttcgctctcggcttcaatttaaaaccgaagaaaagtggagatctcggcttcgggccaaaaactgaagtgccgagatttatatctcgggctgaaaggattgtccgagagattatcattgtctgagctagttatgtagtttgatgtatatgattgatcatataatcatgatctcataagcaagcacggagttagaacaacgggaatatctcctaggtatgtccggctactgttcttgcatcaacaaagcattacgaggacaagaaatacctctacctctgcggagtagataatcatgatttcaaggttgcacagtcaagaaaaggacatgacattcattacacgacatgaaacaacataaaaagcaagaaagacgacactacaaacactacaacaccaatgaacgtagagatttctctgtattggctattatggcacattgtatgtgggcaaaaacaggaagaaacgaatcgaaaaggaaaccccagcaaccaggcccgcatctccaccacgcaaaacgatctattcataagcgaatccgagcgcagaaacccgggcatgactgaactgaggaaaaacatgtcataccaccttctagcaaaagaagcgtttaatcgtagaggctgtcgtcattgccggcttcgccgaaggtatcgttctcctgaacttcgccagcagatgggaagcggaagaagctaccgcctccggtgttcttcaggctctgggcgaaggcctcgtagcggcggatctccacgtcgctaacagagcggcgggcagacttcatggcctcctcgaagtgagcgcgagtgagctcaggcacgggatcttccgcttcctcatcctccattgtgatgtcctcgccggcggcttcgcgctccttttggcggtcaatgtcggcggagatggcctgcttgatggcgagcttaacggcacgctgtgtcacgaagccgagatcggcaccggagaagccgtgggtcttgctggcaatgtaagcaatatcgacatcaccggcgacaggggtcttgcgaagctgggccttgaggataccctcacgagaatcctggtcaggcaagggaacgtagaccagggtatcaagacgaccaggacgaaccagagcggcatcgagctgctcaggacgattggtagcaccaatgacgaagacgttcttcttggaggtcataccgtccatctctgttaggaaattagtgaatattcggaacaaaatatagcaattaacagcggagacttaccagtaagaagttggttaacaacacggtcagaggcaccaccggcatcaccgacggagccaccacgagacttggcgatggagtccaattcgtcaaggaagacgacacaaggagcagcagcacgggccttatcgaagatatcacgaatgttgctttccgactcaccgaaccacatgcttagaagctcaggtcccttgacggagatgaagttggcagcacactcattggcaacagccttggccaacatggtcttaccagtaccaggaggaccatagaacagtacacctcgagaaggcgagagaccaaacttctggaacatctcggggtggtccacggggtattggacactttcgacaagctcgcgcttgacctcctcgagaccaccaatgtcgtcccagcgaacgttgggaacttcgaccacagcaacctcgcgcaaggcagaggggttggagacacccagggcaaagcggaagttctccatggtgacaccaagagcctcaagaacttcggcatcgatggtgtcctcatcgagatcaatgagatccatcttctcacgaatctgctgcatagcagcctcggagcagagggaagcaagatcagaaccaacgtaaccgtgggtctcggcggcaatggtctcgaggtcgacatcatcaccgagcttcatgttcttggtgtggatctgcatgatctcaagacggccagttgggtcggggataccgatatcgacctcacgatcgaaacggccgaaacgacgaagagcaggatcaatggagttgggacggttggtagcggccatgaccacaacgttggagcgggccttcataccgtccatgagggtgagcagctgggaaacaacacggcgctcgacctcgccgttggtcttgtcacgcttgggggcaatggagtcgatctcatcaatgaagatgatagccggggagttcttctcggcctcctcgaatgctttgcgcaagttcgattcggattcaccagccatcttcgacatgatctcgggaccgttgatcaggaagaagaaagcaccagtctcgttggcaacagcacgagccatcaaggtcttaccggtaccgggaggaccgtacataaggataccacgaggtggcttaataccaatggacttgaacagctgaggatgacggagaggcaactcgaccaattcacggatctgagccatctgcttgcggcatccaccaatatcatcgtagccaacctcgttgaggttgccctcctcatcctctcgttggatgggctcaccctcgcagtgaataattgtgtcctgggcaacaatgccgtattcgggagggtcgacctccacaaccttaaattcgatttgtctcataccacctcgtactgtgaacaggtcaccctgtcggactggacggtaggcctcgcggaagtagggagcaaggtagacatcgaagagagagccggtcagaccctcaatcgtatcagcgatgggaaggacggcaatgcgcttggcctagatcacgagcataaaattagccaatagatcatggtaaaagatgacgtggaaatgcacaacttacgtatttgatatcggggcaagggtgcacagtgatcatgtcgccgtgcttgacacgaaggttgtgacgcacaacccggttgatacgggcgcttccatcatcgagatcgtcatcggccaggacgatcagcacagtgtccttgcgcttcttacccttcacgagaactgtatcaccacggaagagctggagggtctccatggtgttgttcgagagggcaataaccgagttatcatcgttaacggcatcggtcacgctgggtgaaaactgtcagcttcttgcctccaacagatatctcttatcagctactcacatcaaggaattgggcttcttcttctttttcaagatagcggtggaggtatcgagctcctgcaattttcgtcagttccgagggcctttgtgagctgtcctgtagcctatgcttacctccttcttctcggcgcctgaagcgtccctggagtccagttagcatactcaatagtcaagagagttcaaatgaagcgtactgcaagtggaccctcttcttgtcatgcgtgtgatccggctcggaagacatgatgggcgtaaatgaggttgtggcggtgatggaagcaagcttgagtgaacaaaggtgtccagtgcccaaaaagagtcggagcgagacacggatttaaaatggaacgagaaatgagtactgaaaatgaaaaaaggaccgatagatcagaatcagagagcgaacccgatgacggcaaagtggagatagaggcaggtaacaggaatgatgatgttgagcttcctacctctgctcttagaactgatgatgatgacttaagcccggtgcttatgtcatcgcgttgtccgccacaacgaagcgcatggaactcattcgatcgggagccttgatgcctggggaacggccaacagtagatatggttaccaaggtccttacaataatacattcaggcgagaatcttggaacgattcaattataactacagcaaccctaaagagtaaatagaaagttcatggtgcacttgcttcagagttgaagaaattccaactctgggtgaccggttaagacaaggaatagatccatagcaatgccggccaacggcgagtcttctaagtcatcggatgaagacctatttggcctgttcaaatgctcaaataatggagaaaggtcgtacacttagaagcaagtgatatctttagttgtagattcagcaaaggcttggatcgaaagaaacgccctccaaatgttcaagccaggtctatattccgaaaactggtgtaaacctagaaaatgcaaagccaataacaaaccatgtgcgctgtcaacatcaggtatatatgcaagtaggaggatattcgttacaaataggaaaagaaggaaaaggccgagaaccaccacaagtaatctaatagctatgccttgacacttgcggttccagcccagcagtcatggagactccaagctccggcgcagaagctgataagcccggtcaagctatcaggaataccgatgcctttctcgagacaccagtgcagacacaagggtgcccagatgacgttgttcaccatgctctttcgccaagcccggatctccaaacgcagtgcctcgctatcttcggccttggtctctttagtctcgaccgtgccggcagccgctcgttgtgcggctaaccgttgtctgcgtagcacactctggcgccagagcacaaagaactggaagaagatgtgcccgaaccatccacgggtactccagatttcccatttggcaacgccgccatatttgtccacgaaccgcttcgagaccacccccttggaagcaagatagcccacgttctcgagaagctggtagatcacgtttgagatgacctgcagtacggttagggcgtggagaatggggtcggctggcggcgatttgagggtgtcagctccccagatccacaaagggagcagcccgaacagtcgcaaattgtatctcgtctccgatgcgagggaggaaagggccgcgaatttcgattttgacgatgcgggagtgacgttcttggtgggtacacgaccctttagccgcgcaaggatacccagctttgtttgcaatgctatccagggcgctgatgcagtgaggtggtggagcattgaggcgacatagttgatagtcgctagtactcgctcttgcccatttgcctcggaaagtagtctgcgggagcggtcagcgatattcttgccgcgccccggaacataggattgaaggaggccttacagatccagccgacggattgtcacatcggttgttgtcaaggcggctagcagctgccgtttcgcgcatgagctcctggcgggtgcttgcccaggcggggcatcagtcgcctcgcctggaaggtgttcagggtcggacatcgtgtatgatgaacataagaaaaagcgaaataaaatgtggaggtggaatcgcacaagcggaaccgaggctcggaacttgaggaagttcgatctaatctccgagggtcattattccccagcatttcggtcatctgacatgacgttaaccatatcttgagtaaccatacggagtagttagttagttgactaattagtgtataactatatttttctcgtagctatcttgctggcttatattaaagcatacaaattaattaaagcctactgacaccttgatccgctttacgtgcttagttctatactatggcttcacaggatacctaatttaacatcatttacatagtctacatctttctagtaacttttacttttacttaaaatcatgcttggaaattcttcatttcgggggaaatcccctagtcctcacatgtggaatccgaattccaccccatcctcctctcacatgccgctcaccccccgctcaccccggcctgacttcgacctcacctccacctcttcctcaccccggcttcaccctccctcactcccctcccctctccccaccgtgaatgtagcaatgcccaaatgggccatgaataaccccgaagggcaagaaaaacaacaaaattgtgaggaccctagtcctcaccgaagggatctgccgtcgatccctgctcgtggtcagactcacgctgccacggcgaaggcaggattcgccagtccgtttggggctggaagtcccaatcgacggtgctcgtccttggtggacgattggcgaggaggttctccaatcgtctgagctcccgctcgtgacgttgtctctcacctcgctgctcgcggaggtcatgtaaccgccgacggaatcgacggccggtgtggcgaccggcgaatccgagatgttgccgagcacgaccaaggcgaccggacgactcatgattgttgtcacggcgcgattggaagtatcgtcgaatgttacccacaagacgtcgaatattgcccacaagaccggtgggtgtgccctcgtcggagcttgcataagctgcataggagtgatcgctcgcagtggtgatgaacgacattcttgccattgaacggccgtttggatcctcgacctggaagccagaaggatacggcgccatgccggagtggtcgctggcagtggtgatctctgacattcttctcatttcataagcatcctcaacctggaagccagaaagatgcggcgccatgccggagtggtcgctcgcagtggtaatgagtgacattcttgtcattgaatagccgtttggatcctcgacctggaagctagaaggatacggcgccatgccggagtggtcgctggcagtggtgataagtgatattcttgagattgaatgacccctcggttcctcggtgatgaatgaggtcgtcacttgaggctcttgtgactcggcctggaagccagaaggctgcggcgtctccgcggaacggcgtgaaggcatgactggtgtcatgtcgggatgtgtcgttcctgacagaaatggtattattgcggatgagaaagcacaagaaatgagatgtaaggactcgcggtgtgctgccaggagccttacacgcaggaaaggagagatgcttgatacttcacccggcgactggaagccgaagaagtaacgcttgattgcgaaccgacaaggtcgccggtgtacggccagaaggcctacacgtggggaaaggtacttgatacttcacctggcgactgggagccgaggaagtacgtcagtcacgatccttgagtgtgaactaacaaggttgccggtatgctgccagaaggcctgcacacgggaaagacgttgcaatgtgatgagaagtgataaagcagatggaattaagatgaatcaatgaagagaaggggtgaaaggatgattggaagaaatgaaaggatgggtgggagagaaggaaacaaatgaggagcggtggtgttcaagtactccaggcgtgtggtcgccataatttggatcgcatcgtcgctgactcgttcgttgactcgtcggggccagcggtttatggaatgagctccatgatcgcatttttccagcgacaaccccgacggcgacctaggtgaggtgagccgcgtttacgcggtatgtaacccattgattcctttgcacatactgctcaaacagcataggtctaaatcgcagagcgtaactataatgataaacagttgtcattctgacttctgtttatacagaatcaccgatacttggcaaatgttccatccatcacattgcctggttgctgctcactggctcatgtatagatttggctgaagtgttatattccgacactggaccgagacatagctataacaagcttgaatggcacaagggcttgctttatgtctatcaactattcgggggatgccgtcaaaatacgttctgcaaccatgcagggagagatgtggtgattcttattgattaccttacctctagagctctgttacctagaagaatatgggctaatagactagattttggattgccagactaccggtttgatagatgataaagaggcatacactccgtagtcacgggtaatgaagtataggctatgtatgttgtatagaactcactacaggtctaagccgacaaatcccatatctctacatatataattcatttagtcttgagcgactaattcagctacagaaaccacaaacatagaagagagacaatccataagcctaggggtgttaaaagaagtgataaccccgtgaccatgaaagccctggcattgcaccaaaaacgacaaacagtgaacttccaagattcattatgatcaggatctaaaaaaaacatagatctatataataaaatatacagcataaacatataaaatacatacaacatactccgtatacaacgttgttaatgataggggtaaaatcgtcaaagcccccagatccaaccaaaagccgtcgggggtttccgatgggctccgccaatggatctcgccggggatccatccaccgattgttcgtatagccgtctcgatttcctggatatattcttccgacagaatttatttagtcggagagtgattcaagggagatattttgtgtgagttatatattgacggcctcggctgtcctcccccatatcccatcccagcccagccaccctcggaccgacataaacaaacacgccccccccccccccctaccccccctattttggnnnnnnnnnnnnnnnnnnnnnnnnnnnnnnnnnnnnnnnnnnnnnnnnnnnnnnnnnnnnnnnnnnnnnnnnnnnnnnnnnnnnnnnnnnnnnnnnnnnnnnnnnnnnnnnnnnnnnnnnnnnnnnnnnnnnnnnnnnnnnnnnnnnnnnnnnnnnnnnnnnnnnnnnnnnnnnnnnnnnnnnnnnnnnnnnnnnnnnnnnnnnnnnnnnnnnnnnnnnnnnnnnnnnnnnnnnnnnnnnnnnnnnnnnnnnnnnnnnnnnnnnnngaacaccgcccccccccccccagtctcaccccatcgtgtcttcccattttctccacttggcatcttatcatccattgcatgttaatcccattcacattattaacttattttaggcgcgtgtgtaatctgaaaagctctcttaattcctcctgaaccctcctgactcctgccctcctccaaccccctccgatccccacaatgtccgtcaagttccaagaggagaccgtccgcaccgtcacgggcggcggcaagtctgaagacctagcgcatcgcgtcggtgagcgattgaccggtggaaagacagcggctgggtatctccaggtatgcagcgcctacccctccaataacatcgagccaacactgatccggggaatggatcgtcaataggcatacctccttcagctccagaagaaccctctgcgcacgaagatgctcacctctggtgtgctctccggtctgcaggaactgctagcttcgtggatcgcccacgatgtcggcaagcacggccactacttcagctcgcgcatccccaagatgtcgctgtacggaatgttcatcagcgcgcccctcggccacgttctcatcgggatcctgcagaagattttcgccggccgcacaagtctcaaggccaagatcctgcagattctcgttagcaatctgattgtacgtcgtcgctgcgatcacctgtcctgagattcgctaatattcccccgttccccagatctcccccatccagaacagtgtctacctgacctccatggctattatcgccggtgcgcgcaccatccaccaggttcgcgctaccgtcaaggctggcttcatgcccgtcatgaaggtcagctggatcacctcgcccctgtgtttggccttcgctcagaagttcctccctgagcacacctgggtgcccttcttcaacgttgttggattcttcattggaacctatgtcaacacccacaccaagaagaagcgtctggaagctctccggaaggtatgattttatttcttggaatttgcgacttgattgctaacgactcggcagcgttacgaccagcgtcgcgaccccagctacgagaagcgcgacttcccttaaatgggccgagtccgcaattgactgcaaatacacccggacgcgtcgaagacctatgtgtgtcgtctcttccggcttgtctgctgtcacttggttatcctttgtttactattctccggtgtcgatctaaatccatgtacacacccccgtgcatcttgacatgccgcagatatctcccccttgatgttatcactcaacctcatgacgaatggctttatatctctgttttatttcaattccaacccttgaagatcggtatatatatcttcttttcagttgagctagtcgcgccgttctacctctgctcatctataccgctatatacatacactagtcgggatagctataatcgaatgaactgcaactgcccttgacatgaaaacggcacaatgtggccattatgaattctgtcgtaactatgaaagatctgacacacagggtgtcaatggatgatacaagtgggtgggcaaggtacaagtagacatggccagcccacccgaaaatgagaagacacaaatccctcacatccaacatccacgaagaggccagaggctaccttattcaacctccatctctgaggcctttccccgcttagcctgaacccaggcaacaaagtcatccagagcaccgggccaagccccatcaggactccaccagcccatctcctcatcttcgagactcttgcgcataaacacctcaacctgctcccacagatccttgttaacaggcttcttcccgcgctcttcgaggaactcgatccaccaatccagccacggggtcgtttcggtgttccaggcgacaccaccatggtcagttgtgaagaaaagacgccactgctcggcggcgatttcgaattgcaggttgcgctgtccttgcatccgtgagagcgggaatgcgtatctgtagactcgtcggaagaccgctggctcttgtgggatgacctcccggaggtacttggcgtacgcttgcattttaggcagggtgtcgcagcttgtgggttgttagattggataaataacattgaggatgatttgagtccgggttgaagtgggttttcttcgttgatgttgtacttaccgaacgttcagccatccgtccctccatccctggcgggtgaactcgcccatcgatggtgacttgagtagctcggcgatggctaggcaggttacttcgtcgagctcgacattcaaatcgccgaggtaatctatggctcgtgtgataccgatggtatctgggctctcgactgggtcatctgggaagacatgagtatttgtataaaatcactagtcaagaatgagtaaatacctcggtagctttcgaagagctttgtaaattcggaagtcacaactgcagcagtgccagccgcggcggcgaagaaactattccagtgataacgttagcatcgaagcatttcaagagttgtccatgtatgatatcttgagagcgggatggtcaggtatatggtcgtggggctagggaagggcaatcacttcttcttcgcctttctcggcttcttgactcgaggcatttgggacgatgaagtatgtagtgagagattcaaactttccccaagtgagacttaggaaaggctgagaaggaaagatgctctagcgacctgctagcatcttgggacttatgtgcaggtaggggttggagacaaataaaacaaagcgacacaaaagtcaggtacaattatgatgacaagcacttacgcgtcaagcgcgggagccaaactccatccacatgctttgaggaactatatcagaaagttagtcctttttgatcccacgtgaccggatagaagcatctcaagatatccaagcagaccacacaggagagaatatgccggtaaaacatgcaagttactcactttcacagcaacagactcctttgtccgtgtacagctgacaaactcagcgattagatgcttctggttgcttgtgtatggtggcatggtggtggttgacaatatgtgtgtccactacgcgcgggagaaatgaaataagtggtgaaaacacgcggggggctaaaagcaccagatttgtagtgtgcgcgtgagagaaactatgctcggctaagaagttacgagaaacaccagggctatgaggactgtagtgagttatcatctggagctgcccgtgatcatggtgctgactcatcatgtcctccaaacagtcctaatatcaactacaacccgggctatacatccatgaatagacttggcatgaggttttattttcattacattggacatggatttgtgagtattcagagtatgtattttcatatagtaaccattacagagaagtttgtggtcaacatttgccatcaattcatcacattaggagcaatgagcacgggattcgatggtaaaaagtacagtcaacttttgtaagatcagatagatcaggtagaactcccaaacgccttttgcaagttgcaaacatgtaagattcggtgttcgaattcgtttaggtggtgaacaacgtatcctcctattatggatgttagcaatttgatccttgataagttgaagatagatccaactcacttctctgaggtactctcctgcgtcggcctgttcatttgagttagccaatgtaagtaaaaacctagagctgagctccacctacctgacgatggatcgcgatactggtaggatctaattttgcgatctgcgcggatgaccttgctgtaactccgaatcccagagggacgtcgttggagtccagaatcacaattccctggttttctgcgacatcctcactagaagacggtcagccttgaaaaaggatactcatttagatgataaccaacctgaacctagccacgtgggctttcaaaaccgaaccgccatacaacagaggctgaaacttgttagcagggtacagcagaccctatcgaagttgagatatcaagcttaccatcactccgtttgctttgatccagacctgtgccagagatatagagttagcatgcctggttgaaatgcttagattgtgatacgtaccttgtatcgggcgtgttgcgccaggagatccagagctgttaggttgatgcggaacttgccagtctgccataatattagcatcactgatcagaatatgaacagagcttatagcactcgccttagtgtattttcctatcatagtgcccatgctgagaagctgatcgcgcgggaatgagatgctcaggttggcaatctccttgttcacgtagtaaacccgggatccttgcaagcggaaaacactcatggatccatcttcggctggggtaataagagaattgagactgcggccggtataggaagctagcttcgtgaagagcgtccgtgtctcttcctaaaagcgtgataggttagtcaaagtaatcaatggtcattgcatttagtacgcacttctgtgagggatctcatattggcggatatgaagctgaaaatatggcaaaacagttgagtagcaacgagcttgtattgtcgggaggtgaggagcaagaaaaaaaaccaatgtcgggcaatatctcaccgccaagaagcggacctgaaatttatagcgatggaccggacatgaatagccaatcagagcaatgtttgtctttccgcctagaattttcgggaccgccttttcactctaaagatattttttactattctccgcaaatttcaccgtcaattccccaaatctccagctacaaaatggcgcgtggtccagaagtgaagcggagacgattgagtcctccagccgatgttgaggactcctcatcgcgctccaaagccgaccaagagtgggatgttgagcaagactacgaacgtcgcccgcgcaagaacaccaagaaagctggcgagaacgcacgattgccaatcaaaacatctgaaggctttgtccaggccgaagccgagcctgcagaccagggcgaggaaaccgacagctttctgggtaccgatgatgacgaggaggatggctctgagggcgaggacggagaagaatctgaggaagaagcacccaagattccggtgaagctacaaatcttgcaggcaaaggaagagctagctaagatggcaaccttgatcaacgaagatcccgaggagcacatctctttgttcaaaacgatggccgagatggtgtcgaaaaaatacacacctgtcacagttaagaagctggctctagcctcacaggcggctctctacaaggatgttattcccggataccgtattcgtccattgagcgaagaggaccagactggcagggtatcaaaggaagtgcgcaagctccgagacttcgaacagtcccttgtggcaggatatcgagcttatgtccagaagcttgctatgctggtcaagccatccaaacaagatggccccacagatgctggactgaggagcttcgcgatttcgatggcttgtactatgctcttagccgtgccacacttcaatttccgcagcgagctcctgaagatcttggtgaaccgccttgcacggagaaaacttgatgccgactatgttaagtgccgtgaaaccatggaggaagtatttgccaaagatgacgatggaaccgtttccctcgaagctgttcgtctgctagcaaagatgttgaaggccagggacttccacattcaccccagtgttttggacacattcctccatcttcgtttgctcggcgagttccacttgaaggcgtctcgagaccgagtggaccgggaagaagaagaagtcccccatggaaagaagccaaagcaaaagcgtgaattccgcacgaagcgagagcgcaaggttcaaaaggagcgaaaggaagtcgagaaggatatgcgacaagcagacgcagtggtatcgcacgaacaaagagacaagaaccaggccgaaacattaaagcttgtattcggactctatttccgcattctcaagctccgcattcccgaactgatgggtcctgtgcttgagggtctggcgaaatatgcccatcttattaaccaggacttcttcggtgatttgctcgaagctctgaaagacctgattaatcacgcagagcgcgaggaaatgggcgtagaaggcgaccaggaggtcgtcaacgaggaagacgacgaagatgaagacaatgtcacaattgccgaaagcgcagcccgggacgctcgccgaaggacgctgctctgcaccgtgactgccttcgccctactagaaggccaagaagccagcaaagccgccgcaggtctccacctcgacctgaacttcttcatcaagcacctctaccgatccctctactccctctccatgaacccagacgtcgagttcaacccagacacagccctccgcctccccgaccccaactcctccgcggaaggcaaacagctctctgagtcccgctccaaaaacaaggtcaacttccagaccccgatggtcctcctcctccgctgcttgcagccaactctgttatctcgcgcacacggcaacccgcccccaagccgacttgccagtttctccaagcgtctgatgacgacttctctccagttgccggagaagtctgctcttgcaacacttgcgcttatgaaccaagtctcgaaatatcatggtcgtcgtatctcttcgctatggcatacagaggagcgcaaaggtgatggtgtgttcaatgcttttgctgctgatattgaagctaccaatgtctttgctggtacggtgtgggagggtgaactgttgcgtgtgcattactgtccacaggtgagagaggcggcggttgagattgaaaagatgatgatgtcttctaagtaaatactgtaaatactgttttgaataattttacatgcatatccagctacaatctactctacttggaaatttataatcaaacatcttcattgacatgctaatccacacaggaaatctcacaaagctggccccatgtcctccaaatccaacaaagagatgagagctggttttttggggggggggggggggggttttggttttccatttttttttgtttttttttttctggttgtacttgcatcatgttgagcactggcatggctcgcaagtaagcgagcttacctgcgagcccccatccttgccaggctcaactgggggacacgcggcccgaaggctccgcggtccggatcgtggagatcccgacctcatttggctgaggccgggacagagtgtgaacgtcggcgagtgggacgggcacatcaccgacagcatcccgggggatgcgaattccctaaggaatggtgggcacagagggggccgcctccccctcggtggtctccttcgcggaagaagagctggcggacttcttcgagcccctcttcttcgaccgacgaggaatcgaactctttgcagagctcgatcctggcgaagtcattgtcgcggacgccgcgactggtactgggggagccgccgttgctggcgaaattgctccaaccccagaggacacacgagtcctcagggtcccagtgggtgcaacggtatcccgtgcaggcaaagggttgggtggaagaatcctttccacgtcatcagacatcttgagtccgtgctcatcttgcaggactcggagagcagtgttgctgcggatcagcatctgtctcaagtagagaagctgctttccgtggtcttcggtctgagacccgatctcctcaatatcctcgtcgatctctttgttctttcgacgttggtaggccaggaattgctcatcggggttgtccgttcccccgaggcacatgtcgactttggcactcaggttaccgaaagacgaggtcagctcgttgatgtcgctgcgcatgtcgtgaaccacctccttgatttcggcgacctgttccttgaggtcgtgaacctgctccttgacgtcatccacgtcaagcttcgccttggtaacctcgaaagacatgtcagactggcgctcaagttgggcatccatttggtccttaatgtagtcccgggtcacggtaacaaagtcatcgactttctgttcgagcttgttgatgttgtcgatcttctttgacagtcgctggatgtctgtctcataacggtactgaagagatcgaacagcctcaggaagatccttgagagtcaagttggaacgtggcacggtggtaagactgacaccgctagtgcgctccatagaactaagactgggacggtgcatgtcatcccttctgaagatgggtgcgcgagggctgggtgtgtgaaggtcgtatctaggagacacggggagtggcttgttgttgccatccggaaagtcagaatttccagccatcttgggtggagatgggggagcagaacaagagcgaggtttgaattcagtcagggtgaggttgcccggtcgattcttcaggatggagattggaagaggagggacaggggggatggaagaagaacggagagtggtagcacggagagaagaacgagaagggtgggaagaaaggtgggaggggaattttccttgttgctgtgcgaacgcgttacgtttgttaagcgaaggctcaggcagttccaaggactgcgaactgctgcctgcgacactgccagaaggcaaaccaaccttaggattggtcgacttgacaggcgcagacactgggactgcagtgacagtcacgtcagaacggggagatgccagtgggttacacatgtcgggctcgtcgaattgtacgatctgggagagggtgctgcgacgagaacgagacgaagttgcagaggagggagtgtcagggcggccagtacggnnnnnnnnnnnnnnnnnnnnnnnnnnnnnnnnnnnnnnnnnnnnnnnnnnnnnnnnnnnnnnnnnnnnnnnnnnnnnnnnnnnnnnnnnnnnnnnnnnnnnnnnnnnnnnnnnnnnnnnnnnnnnnnnnnnnnnnnnnnnnnnnnnnnnnnnnnnnnnnnnnnnnnnnnnnnnnnnnnnnnnnnnnnnnnnnnnnnnnnnnnnnnnnnnnnnnnnnnnnnnnnnnnnnnnnnnnnnnnnnnnnnnnnnnnnnnnnnnnnnnnnnnnnnnnnnnnnnnnnnnnnnnnnnnnnnnnnnnnnnnnngcggggccgcggggaccttccgaatcggtgtctgttaggaaatcaagtgtcagtgactcatgttaacccttcttgcttcgaaataaacaggaagtgaaagccttcaattgaccatgtgagaccaaagtcatagatatctctcatgtttttgagtgtctctttctctatcgtttctttcgaggcatattctatgagcaaagaatgattcctttacccacaggacttgcttctatagaaaggaccaccatagagaggggtttgcctgtacagagccaagcatctgacctcaaggaatcaaccgcaataccaaagaaaggaatatgattcaaagaaccgatccatagctcaagaaagagatctgattcaaaagaatcatgccgattctatagcaaggtacccgattcccaggagccaagctgatgtccgattctgcaggcagaatggcccaatccaccctattctcaagaaccggctcaatctcacagagaagaaacccaattcccaagagccaggctcaaccccacagagaagagacctgattcccagaagcgaggctcaatcccataaggaggagacctgattattgggagccaggctcaggctcataggaagactaggttccgatgaaaagggaaaaggcccagttccatggtgtgctcgatagacacggggcccatgtccaccgaaagagacactccatgaggtaaaaggcgatgaatgcttcaaaaatgaagggaatctactaaccttgactttttctcgccattttcctgatgttttccagagcaaatggtgaaagttgtgataatggttgggagaaaagaagaaaaggaagacgtgtgtgtggcaacaacaagcgaagaggacagggtcaacaaccgcggacacgtgcccgagggactatgatgacaaccaccattgagaccgaagggaaggcacggctgcctaagaccttattatggctcatatacccatatcgaaggagccttccacgtgggcacttcatggcccaggttctctgtatttgacatactcgaatcgaagatacggacaccaacacaccagcaacgaaacgcaaaggcaaagagaatctctacctaaagaaaagctggcaaagtcgcaagtctatataccaactttccaacatgttacgcatacacaaaagcatagtgaagtgcaacaatccaagaacaaaggaagtccagcacatagaatccaatacatatgcaaagaaaccagaagattacaggcaaacaagcacaaagacagttcaagtagaatttattcatcaaattcatgtcataagtatactggataagtagcaagccagacagatccatcaagagcggccggcaatgccaacaccaacatagcattggagacaacaaaaggaaatcattaaccataagatgtaagcaaagcaaagcaaaacgcaaatgaaattcgtaaatatgaaccaggaacagataatacaggggaataaaatcagtgagtgggttgggggacacccggagaggttttatacttcgtggtgccacgcacatcccgtaattccacggatatagatcctcgaacttccaagggctcctggatacacgtgaccgtcaccgccaccgcctccggcagtatcgagaatcgacggctcaagaataaccccagaagatcgcgagaaagggcatggcaaaaatcgcaatgaaaaacaaattgctgatcgagcgtcagttaatcagcttgaaaacagaatttgcatcatgaccacaaatttcttcaacagtgagagataggagagagacacaaggaaataaaaacagttggctagaagacaaagcacgggaaaacacaagattcagtctaattggaggccttgtggcgacggaaaggtgaaaagatggccccaaagaaattcacaaagacagtgcgcaggattgctttgagccagctgtcaggtgcaccatttagagaaacagcagtcactgaccggttctgactcgacgagcgagcatcctcatcattattctttggtgtaagcgcattgtcggcatcaggctgagcgtcggatgcatttgcagcgggttcggtaattcctttgctggcctcggcggcaggctgggactcggtggcactttcgactgtcgcgaccgatggttgctgggtagccgtgggcagttggtctgtagagggttggttgagcttgctaagaagggcttcgcggtcgccagcaagagctgcaagagcgggatcagtttcgagagatatggcagacggttggtatgaagtatagaacggtgttggcttaccgtctgtggactgtgcatctgctgcgggaacctggggctgggtctcagccttcggaacggattccttgtctgcattggtctctgctgcagtctcggattcgtggtgagcaacagcggccacgctggcgccagcaatggcggcagcgacagcagcaccagcaccaagaatctcggtgctgatgccagtatcctcggtggcttcgtcagaggcggacctagcggtctcttcttgcttggcttcgggctcagttggtgccgatgtttcgatatcagaggtggagggctgaatcgactccttcacatcagatgtctcagcgacaatctcgggctcgtctgcataggaaatcgactcagaaatagccacaacatcgacctcatttgcagaaatggtctccacgacaaaagtagactgttctaggacctcagcgttggcatcctcttgtacgggctcttcgacaacctcagcaacaactggcgcttcggctgcagcctcttcagcaacgacggcgggctgctcgatgacaacttcctccagcacagttgtctcgggctcgagctccttagtagattcctccactggagctgcctcgggagtttgctccgcgggagcagcagcttcaacgggctcttcaaccttcacaggctcttcggtaacctgctcctccacgactggtacttcagcaacttcaatagcctggatagtgggctcaacaatgacgggctcagtcacatcctcggccttatcagtagctggtgcctcagtagcagattcttcaacaacgggtgccacctcgggagtctgttcggggacagactcagcagtagactcagctgcggtttcgagaacagcaattggctcatcgatggtcttttcttcgacaacgggagtttcagcaacagcgggctcggcaatgacagcctcggccacggccacggccgcagcagcggcagcaacttcaacagcctctgaaacagtgactggctcatccacgggcttctcttcggcgacagcaggctcagcgttttgagaaacaggctcttcaacagtggcagcggcagcagtctcggtctgctcagagacgactggctcagcaacaccttcaatctcgggttgcttcttctcgaccttctcggcctcgtctgcagtaacatcagcgacggtaggagcctcggtggaagacttgatgggctcctcgacgataagttccttggcggactcaacgggagtctcttcgacaacgagagtctcttccacaacgggagtctcttccacaacgggagtctcttccaccaccggctctggggcagaggtctcagcaacgggctcttcgatggccttgtcagcaacgagctcttcggttgtctgctcggttacttcctcaggcttggtagcttccggctgctcaacggcgacttccttggcagtttcagcggggacagtctcctccactggttcttgcacagactcaataggagtggcgttttcctcaacaatggcggcggcagcctgaggaatagtagcagtagattcctcagtgacatgagcagcggcagcagctgcgggaatggcggcggtttcagtggtctcggaagcagcgacagactcctcagtgagagtagcggcagcagcagcctcagcaatggcggtctcaacaacgggagactcctcaggagtcaattccttagtggtttcaacaacaggctccgccacaactggttcctctgctgcggcctgttcggtggtctccttgacagactcgacctcaataggctcctgagccttctcagcagtggcctcctcggcgacaacggtggcaggctcttcaattgcttcggtggtgggctcagtggtggttgtctccacggcagcaacctcagtgggctcctcgacagcagattccttgacagcatcgacagtctgctcgggaatgggctcagcaatctcggtctccttgattggctcagcagtcgattcctcagtgacaggttgctcaacgggagtctcttcagccacctccttggtaggctcggaaacctcgacagtcggctccacagcagttgcctctgaagcaatttctggaacagcaacggtggtgtcagcactgttctcggcctccacctccacagtcggttcctggacagccttctcggttactggctcctcggcaggcttggactcttccacggctgcttcggtggcgggggcatcctggacggtttcagggacgacaatggtggattcttccaccgcgggggtttcttcgacagcttcgggagcagcatcgacggccttttccgcggcgataggctcagcaacctcctcaaccttggattcttcgactacgggggtctcttgaacggtctcgggggtagcctcgacagttttggattcgtccacggcgggagtttcttcgacgataggctctgccatagtctcaggaatagcctcgacgggcttggattcttccacggcagcttcagcggcgggagtctcctcgacaaccggttcagcaacgctttcggcaacagactcggcgggcttcgactcttctgtggcggattcagcggtgggcttttcttcggtgatagcctctgcgacagtttcaggagcagcctcggtggtcttttcttcagtagtaggctcttccttggtaataggctcagcaacctcctcgaccttggattcctcgactgcgggtgtctcctgggcgatttcaggggcagcctcgacgggcttggattcttccacggcgggagtttcttcgatgacagtttctgcaacagtttcaggggtagcctcgacagccgtttcctcaggaatgggcttctcctcagtgataggttcagcaacctcgacggccttagattcttccacagtgggggtttcggaggcggtctcgacagctttttcttcgctagcaggtgtagcaacctcctcagccttagattcttccacagcaggctcggcgacagtctcagaaatggtctcaacgggctttgattcttccaagacagcttcagcggtgggggtctcctcggcgacagtctcggggacgacttcggcagtcttttcctctgcggtggtttctatgacaggcttcgattcttcaactgcgggcgactcctgggcgatttcaggaataggctcctcggccttggattcttccacagcgggggtttcggaggcggtctcgacagccttttcttcggtggcaggcgtagcaatctcctcagccttggattcttccacagtaggctctgcagcggtttcagaagcggtctcaacgggttttgattcttccaaggcagcttcagcggcgggagtctcctgggcgatttcaggaataagctcctcggccttggattcttccacagcgggggtttcggaggcggtctcgacagccttttcttcagcaggtgtagcaacctcttcggtcttggattcttccacggcgggagtttcttcgacaagctctgcgacagcaacaggagcgtcctcgacagccttttcttccacggcaggcttctcctcggtgatgggctcagcaacctcagcctgggattcttcagcgctaggggtcttttcggtgacagtctcggggacggcctcgatggccttttcttctgtggcgttttcggctgtttctgcggaaggcttcgattcctcaacggcgggcgactcctgtgcaatttcaggaacaacctcctcggtcttggattcctccacggcgggagtttcttcgacggccttttcttcagtggcaggcgtctcgattagatcggcaacctcaaccttgggttcttcgacgggagtctcctgggcgatttcaggaatagcctcctcggccttggattctgaaacagctggagtctcttcgacgataggctctgcgacagcctcggtagtcttttcttccgtggcagcttcagtggtaggctcggaaacttcctcagccttggattcttcgacagcgggcgcctgggcgatttcaggaacagcttccacagtcttcgattcctccatggcgggagtctcttcgacgacaggctctgcgatggtttcaggaatagtgtcgacgggttttgattcttccacggcagtttcagtggcagtctcttccttggcagcttcaggaacggcctcgacagtctctgactcttccttggtaggttcagtgatatcctccaccgccttggattcttccaggacagcttcggcaggctgctcaacggcagcctcagcggaagtggcctcggtagccgtttcctcgatggtaggcttctcttcggtggtaggctcctcctcgacagtcttgatttctgccgcgggaggctcttcggcgatcggctcggcggcgacttcaggaacggcctcggcagtctttagctcgtccgtgataggctcagcaacctcgggttctacattggtggaagcgacaggcttttcctccaccactggctcggcagcgggcgcagctgccttgggagcttcgactggtgattcctccacgggctcggcagaattttctcgcgtcgaagcagccagggagctaatactctcctgtctcttttgctgcttcttctttgccttcttggccttcttcctttccgcggcggtcaaggggacctcgggttgggttgcatctttggattgtggtgctgtggagtcgagcgaggcagtcgattcgctcagatctgccttggtcgcgctggcagtggatttctcatctgagaaagaaattggttcaactggtgcatctgttggcagcacatggctttccgggatcagtggctcttgcacgctggccatggtttatttcgtttcaaggtcgtaatgtcgtaaaaagatgatggatgggatattaggagattgggggtttttcacaatttgaccagcaaagatttaacgctagatttatcgtgtacagaaaacacaagctcacagagcaaaagggcaatggattattgtgagagtatgggaggaggggaaaaaggcagaaaaaaatctcagcccaaaatgtacaaaaaaaaaaaggcccgtcacggcacagctcacagtggggaaacagttggcatagtgactacatggcgcttttcctctttggtcttttcgtctttcacctctggagcatcgctggagctcgacgtccaatggccgctcgtactttgcgcgctctttcatccggctctccacttccaatatgcggtgaagctggccgaggtttattgtttgaccttctcgctttttgcttcttctggcggtgcaaccgtatgatatacagtcggtggactatcttgatacaacatctgcctcgtttcccctccttctggtggcacagtccaaacgacaaccccgtcaatcgaacccgaattgggcgctaaaaaagcgtcgacccccaattgataaaccggcgccaatggcaggccgcaaggttcttatccacctgtcatatggtccttgagtcattattgcagtgatccccaaaataaaaggacaacatatggtggatgttccattttcaatagtttctccacggattggctgatgtttttttttctctggctcagggcccatatatgcggaacactacggatcgccattctattatttctccgtacgacgcagcgcccaatttcaaggatccggaatctacagatttcgcaaaagctcgtgcctcacactagtagctctcgtgcattgcgtgctgcgtgcgacctccctaagcttgggcctccgaagccgcttttccggctcaaagcacaagcacatagctgcagtaatctgcactggcctgagctttctgcagttcctaggaagactgaacttttgtattccaccgactttcgtctactccgtagttcgtcccagcagatatatatacgcgggtgtggtcggcttcccggtcccgaagcggactccgcaggagaggccaatctaacggagtaaaaatagtatacggaggagttggaccagattgaacccgagtgttggtcttgttctccttttcaaaccccactagtctcctcccgggggggaattatcggctatcgttgcctaggtaaaatcaagtctggttagtggagtatatgcggaggcggaagattaaggggagcttgtatacgatatataaatatgaggttggttttgataccgaatgcttataccaggtgtctccatatcgactaattttaacctattgagcaagttcctcactaatgtctatgcttacactcggaccaacataattagggctttccctcattaggcatttattaggtaagtctagcccaagtgctcagctgcctatttgggaaggtacgatgcggtcagagaacgaaggttaattttcctcttggcataatgtttagacgggacaacgaataattattgtgtataactagcaaagatgtagaagctacctgaccatatgtactagaaaacgatacaaatatcaaggccatcagccacaaatagctacttcctcctcttctcttctttccaaacaccctttcatatcaaacactgcctcgtcttcagggccgaggtatttccctagggtctgtgtataatgttatgattgaaaaagaatcaagactaaaaaatgaaagaagtcatcgcctgagatccaacgggatggatggggatccaagaggcagtgcatcaaagtcaccaacggcggccatccacttctttatactgagcagtgtcatttctcagggaaatgagctttcagccaggctagcgacatcaactgcacaactaacagccatacttcaaccggagccccagtgtccataagaacagacggcccgactatacattgagtttctcgtgcattagtaccatataagcagcagccgctcttgagctagtggatactcaggatcacccgtgctttcgagaccaagaggtctccgcatcgtttgagcatacgcttggcaatcagggactcaagggtatggtcaaactcccacttgtgagacacaagactcgctgaggacaagatgctatcgttctgaaggacgatggaaatagtctctcttatgcatggaatgcggctgtaattgtcgcgggtcgatgagacaacaagtggaaccgaaacccctttaaaccattccatggcggcattgaagatcaacgccgcgggaaccatgctaatgtacgccttagctcatgacccgtagcccacctaggtgggtaggccgtttctggtgcttggtcaacccataaatccggggctggggccccaactttagccaagatcgttagtcaactcttgtcattacggagcagatattagttttgataggccatcttttgtcacagagccagatttgttcttcaccctccgtggtttgcaagatcctcgtgaatattagacgcagtacaggtatttctaaagtcggaaggagccttgccatgtatgagagacttgtccacgagcttatgaattctgacaacgaggagcattggtttctgatggggatatcaatatcaccagagtatcgtggttagatatggccggttgcaatggtgaaggcaagtggccgctcaaattatgttgtttgtatgtactaccagcggaggaatagctgaatatcccggaccggcgaaaatgcaaggatccttactcagcaaaggagctcccggtccgaccaggaggtgttctgacgctaaacccaaactggcaaggctaacccgaaaaggaagccattccatgtttgtggggtagctcaggtacccgcttctctccaccttcgccacaggcacagaactgtcgaccacggagtatataggggcaattcatattctcggggaattcaggaaggctggagagtattataggtcgaatgcgatggggacaaaggggtgatagcacgttccacaagaagtcccacaccgaaggcacataattgacacgcaactaattccaggcagcagagttaatcgaggaataagtgcataagactataatacatgctccagaacatacaacataacatacaacatgtaaatcagagatcagccctatccggggtgggtccaagcggtcagccctacgagaatttgatcgacgctttcctactgatctcccacattttattctctcctattatttctctccagagtgactgtcaactcccacatctgacgtgagaatgacctactatcaagacctgctgtgattggtcagagtcaattgttttggtcaatcaacactaaaagcacgacatcgcgtaccgaagtatatgagccatcagccctatggttcgggccttatggacgcaatatggctatcattactagccattccccttttcttctttcttcttcaactcctcttctctatagcaatctggcgagccgctggttgtgaccctctagactacaaagagccggaaaagacccgacgcaacaatggcggagactatctcgactcgagtcggtcacgctttcgcaaagcttttacgtattgatttgagtccaattccctcggtcgtcggagatgacaccaggacttatggctattacgagtgtgagcctacggtgggcgactggtttcgaggtcatacacctaccgctcctcaagttcgtcgctacgtttggggcctctttcctttcctccattggatcgggtattacaacgtgcaatggctgattggggatctcgtggcaggtgagaaactccatttgaatagtcaaatacagatactaatctgcagctcttgacaggcattactgttggcgccgtggtcattccacagggtatggcatacgctgagctagccaagctgcccccagagtacggtctctattcttcgttcatgggggtcttgatctattggttcttcgcaacgtccaaggacatcactattggggtaggatcagtccgttctttcctgggaaacaaacacctaacactctcagcccgtggcggtcatgtctacgctcatgggttcaatcatcatcagggttcaagcagttcaccccgaaatatctccaccggtccttgcttccgctctggcaatcatttgcggtgcgatcgtgttattcctcggattgctgcgtcttggcttcatcgtcgacttcattccccttcctgctatcaccgctttcatgactgggtccgccatcaatgtttgtgcaggtcaagtgaagacagtcctcggggagaaagcgcatttctctacgcgtggggcaacctataagatcatcattgatacgctgaagcatctcccatccgctcggatggacgctgctatgggtctcacagcgttggcaatgttatatggtatacggtctgcgtgcaactacggaacgaggaagcagccccacaaggccaaaatgttcttctttctgtcgacattgcgcactgcctttgtcgttctcttctacaccatgatcagcgctgcggtcaatctccatcgacgcgaccatcctgccttcaagctactcggtaatgtcccccgcggattcaaggctgcaggagttcccaaaatagatattccaattatcaaggcatttcttggtgagctccctgcggctgtgattgttctgctgattgagcatattgctatctcgaaatcattcggtcgtgtcaacaactataccattgacccatcgcaggagtttattgcaattggcatatcgaacctactcggtccgttcttgggtgcatacccagctacaggttcattctcccgaactgctatcaaagcaaagtgcggcgtacgaactcccctcgcgggtgtgatcactgccgttgtcgtccttcttgccatttatgcgctgcctgccttgttcttcttcattcccaaatcgtccttgtcggccgtgatcatccacgcagtaggagatctcgttacaccgccgcgtatcacctatcaattctgacgtgtatctccaattgacgcactcatcttcttcatgggcgttatcgtgatcatattctcaaccatcgagaccggaatttactgcacaatcgccgtctcactagcagtactccttttccgacttgccaaagcccggggtcaattcctgggatacattcaggtccattcagtcgtgggtgaccatatcctcaacgcatcccagggggacccaaacacagaattcgaagatgataccgaaggatctcgaagaatctacctcccaaccgagcatgacggtggcacaaacccccgaatcaagatccaccagccagccccaggaatcttcatctacagagtctccgaaggattcaactaccccaatgcaaaccactacacagaccacctagtcagccacatcttcaaagcgacccggcgcacaaacccacaagcatgggaaacaacaggcgacagaccctggaacgaccctggtccaacccgcgccgaacgcaaacttcttctgtcggaggaagcacccacttccccactcccaactctgcgcgctataattctcgatttcgccgccgtcaacaacgtagacgtcacatccgtgcagaacctcatcgacgtccgcaaccagcttgaccgttgggcatccccagacagcgtgcagtggcactttgcgaacatccacaacaaatggacgaagcgtgctctcgcagccgccggcttcgggttccccaccgtctcagatgggacaggtcctcgatgccagaggtcgatctttaatgttgcggagatattggatggcggactacctgcgttagtaactcagtctcaagtcggcgggttggaggaatggtcaaaggacttggaagttggcctgaatgtgcaggagagcagtgcctcgtcggtgatggatgtcactgaggataatatccaggttgtgcagactggtgagagtacgaaggttaatacccatcgtcgtcgcggtcgatctggtgtcggtacttgtatggcggccgttgatggaatcaaccggcctttcttccatgtggacctgactagtgctctgaagagttctatggctgattcttaggatgcagatgctggcttgctttccgtttaatacttgctcgctttctttgactggctttagcccttattagggagaacttcaatctaatgaataagcctatatagctcttgaatttatcaattcaacatggattatttcaagctgcaatttgactaggcatccaacaactttttatatacctgttatctacgctacagtcagtttattcaccggaactctgctgggaaatccctctgagttgtagagctcaagactgacggtgtcggatctcgatcgcgcagatcgaaaactagtcctaatggcgtatagctagtggattccgatgatcttatctgtggctgaagaacggtcatgtgcacagctccaaagcacgaattactacctacaacctactccgtagactgactcagagtgtgtaactatatcatatagaatgcttaagaggatagatcgttcgcaacctgaaataatgcatctccgccatccatagcattgccaattaacaatgccgaggcaaacatgtacgttgtacacgcgaccaatgttttcaatcccggaaagatgaaacacacaaccaatgatttccagtatacgcgctggttcatattccctttccgggatgagactgacgcatctcacggcattgactcggaataccctcggtatccgatgcatccgtatccgtcgagcaggagcagctagctcccaacaaaatcaatctacagctacaggaagcatttcgcttcgcgccggaatccccactgcccggtaccggatctggccggtctggtacaacataccagcatgtacatatatccgcagcttgaagataggggacaggaacgtgggtctgtgacggaacgcgtcgaaggctacgatatacgcaatgaccggtctacatatgttgtgggcaagacaccagggccgtctgtggcgggggcggtgaatattgacgtgtgtttcgctgacagcgcgagcgcgagcctgaggtggctgttgttacggcctggatcgtgcctgaaacgtgtttcgtactcggtgtggttgctgggatcagaccgcgttgatcgagggacgtgtgcaggccagacagtcggtgcgagagtcgatgttttcgggcagatccgggagggcgtggaaagtgagcgcggtagattgtcgttcctgggatcataagccgcggctcatggtttcgttctcgaggctcgcgttgggttatgggaatatatttggtgatttgggtatgtagtagtactgcgcgggctttgaatccgtgggggcggataactatatcgacggaagaataatggcttatgcgctgtccagcgcatcagctgcgagtagcgagtagcgctggcgctagggccgtcggtgcatgtgtttctttttcagccgagggcgtgagtgcggttgtgcggttcaagggaaggaagagttgactacgagttctaaccaccggggggcacatttgctcttatgttagaatagagagagtggatatagtttgagaaagagactaagctatggatactgtgtgtgtcttatgccattacggcaatactgcgtacacgagtgtacaggcgctgaggctatacaatatacgatgccaagtggcctctcgcatgacctcacgggcaggtcaatgatgagttgatgagtcgccgagttgagtattaccgtaccgtattggtatttacccgattacacccggacggggccgtcttcacttatacaacagttctgttcttattctttttcttcttcttctttactcaattgctgtagtcaattgcaattgcaataactgtaactattattattcccaattcctatgttgtatgttatatgtatatcaaccgcgttgatagctagaacacgtaactgcaccctgaatcgagcttgtgtgggtccgccaagctgcgaccaaccgaagttcccaaaaatcgaatttccgggagaaacgcgaagagcctctggttagcccgtttgggatgcttgaattcggtgcagatgcgacgggggtaggtcggtctatataagggtctcgcaccccgttcaaatggctgaatggccgtttaccgttactgcaaaggttctgtaatcttctttagggcaatccggaaagaccagatttcactgcgatagccggattacggcgggtcgtaaatccagaagtggagctgcgaaagcaaggacacgacaaccgggttttggttatgttttggtttttttggttttcgtttccttgcttatggcgtttccaatcttctgcctcgtccccccccctgctatatatctacttaagaatccaactcctgcaggtccgatgcatggcttttacctccctcggcaagcctggggaggataccgaagctgttcggagtaccggatccgtacagaattacgtattttccaaatatgaccactcggtgaggtggattcccgagggacgaagggggagacgatatccacctcatccacattatttggctcctttcagccggtggttgcccagtgactccgtagttggtggacctggaatccgagtcgggccggtttgggtgacgccgggaacaaatccaagagagatagtgggcccgagaggattatgattggagaagaggagcttggaggtggatcgacccaccagattggaacatgcttaagatccaccgcaagggttggattattgtgattttgattttacgattttattattttataattacaacttgtatttccattttcttctcatgttatccctttgtgcaattcgattctacaattggtatccgtacaccgtactccctaggtccaatatattccatgtacatgctaggtataccgctaaaccttgaaaccccatgcaggggatatagataactcagacccatacccttcgacgaatcacacccagtggacccagttggaacaatacccgactgatcccgacaggtcgcaatacgcggtaagaatgcccattacacacccatacgcacccccagcattcctcacggtgtattctgcgtatcagtccacgcacaacttagggcttttttcttaccttacacagacactaagaccgactaggaggcggacgggcgaaaatttggccgtagagtatttatgtcctagtgagtgccgtctcccgtagtttcccagctttttctccctgaaaagtccatctctctcctctttctttctttctcctctcttccacccaccctataattctataaacccatccatcgcaatggccacctctcgtgtcttcgcctcccgcatggcctcggtcatggcccagacctccaaggtcgcccgccctgctgcccgcttccagctcaacgctgccaccaagcgcaccttcacccagaaggcccccgccttcggtgcccccaagcgcatccagtcgcccactctcctccaggccaaggctttccagactgccgcccgccgccagtactcctccgaggtcgcctccgccatggttgaggtctccaagaacatcggtatgggttccgccgccatcggtctcggtggtgccggtatcggtatcggtctcgtcttcgccgctctcctcatgagtgtctcccgcaaccctgccctccgtggccagctcttctcctacgccattctcggctttgccttcgtcgaggccatgggtctcttcgatctcatggttgccatgatgtgcaagtacgtctaaattatctacgactcgggttttcggattcttggaaaaatgtcatcaaaacaaggattttgggttttttgagagaatctctttttctgccggggagggtatttggtcgtgatgtattaccatgtactactttcagcgtcatctacaacacttttctttctgtacatatagagtcctatatggcccatcgaccatccaacctatcaaagagccaaacgaaaaactctgtgtgttgcgtctgacggccgtataatattctctttccttttcctagttcttccccatggggtgagattgtatgtataacgcctgaatgagttactttgctcccaagctcagaactccacgtagacaagctaaaagctataaacccggggcgatcctagctcgatcttgacaacaaacagctggtctttttggcgcttgttatatcccgctctagccgatgttgctacgggtcctgcagcattcgacccgctcttcaacttgcaactacgccagaactaccacccattggcctacaataaacggcgagagtgaactacagagccttcacaatgtgatcgagctatttgatcccaaagaatcagtcctggcggttcttaatgagcctgagaccctcgacgcaagattcttagctccgggacctcgggaacggctttcccgtagtcagctgactcaacctgtgaagtgacatcagcctcggattccagggctacagatcgaggttctgcatgcagcatgcagattgaaggtgaagcaagtcatatttcattgcgaactaggtgttttgtgaattcgctattttggggttggggtaaagctctgatgctcggcaacttccccgtttatatctacgaacccggtctagtccgctttcagttagtgacaatatcaagtatatcttggtgatattaatgagatctcatggatacttctttttgtggattatatgtttataccttggggggttttgtaatttggtaaaggtccaactgagcaatatatatactgtctctaggcttggtttttgaggttcaatatatacattggcgactaccaaatcacatcaatcttgaattatttttctgttattcttatttttcttctgtttaatttgggaaatacaagaatagaaatcacagtaatcaaaagagacttagactctaatcatcattgaggcgagaagagcaatacacgcgttaatacacccagccgacatgctcacactcctgctggaagaaaaagctcaagtgcatcaataaatatacttcatatgaataagataagaccaatgttaacagaagacctgcaagaacgatcacgaaagactccaaacatgccataatcgctcgataaaccgataaaaccaaaacgctgatggggaatatgtatcaccaggactcgaaaagaaagccccaaaccccaagtgtaagcgcatcaaagcaagccaaaaaccaagaagagagcaagacacaccagctagaaaatttccagatcctcaaactcaaccaccaacccatccgccgaacccgttgccaaagaagcatgcatatcatcccacatcgcaccagcccgcgacagacccgtcggccgactcgcataaaccccaacatgaacaaacttatcttccaccccataaaagaaccacgtcacctcgcgcagcttcttccacgtattccccaccgcaccgggcgacagcgcgaacggcgacgccgacggaacctggtaccaaatccacagcgcgtggccgacacgctcgagcttgatacgcagcgagtggatagccagtccggcctgagccgactgcgccagcggcgacaaacaccagtccgcgccatcggccgtcgcgctcaccgacgacgcgttcaccgttcccgacgagaactccattccggctttgacccatttgcagggtgagcgcggtgcgttgcggaagccccgcggtccgtcgacttcggaggagaaggattgcggcgcggcgccggcgaatattaccagtccgccttggtcccattccagttcccagtctgcgctcacggtcacctctgctacgacgaaggcgtggcggagggatgtgaagacgattggggcggtggaggtttcgccgttgggtggtttgcgccagaggtctgtgtttggacctgcgcggagggtgaagtattccatgcactggggtagttcgaatgtcggtggcaggtttagtgccgtgaaggttgaaccatctggaggcatttttgattttgagattttgggatttcttgaattgggtctccaccgttcttaataggtgggaaaaaggaaaatagttgtagagtcacactgtgtggtgcctcgagaataggaataccccggatgagctgcagttgatcactcttaaatccttcagcgatgacgctggggtcacaacatttgcctctaaagtttaagcaggcgcactaatccgagcaaagcaaatcatgcacgatgcatacgcatagaaggcagaaaaaaaaatcttgggatatgatgcagtcgagaattgagatacgccgaatgcgggttgcgccagacctggaaatgggaacaccgaaaaaaagcaaaaggaaagtaaagagaatgagaaaaagagaaaaagaaggtgattgaatcaattattatggcttgaactacgcagtacttatatagcgagaccaaatgtcggcttccccctaatggaattcaggggatgatctgctcatgtccggccggggatggccgtatcaaggaagccagaaccagagtgctggggactgaaccaagctgttgggctccctgccgcgctagagtcatgttctttatggtcgatttctttgaggccctcgagaagcgtgcttgcatagcttcggcgacagatggcctgcgggccagttcgcaagtggcgggtcaccatgcatctggggatccatcacgatgtgacggggcttctaagaggagcatgaaaggtcctttaggcccaaaggacacaaggggcatacagaacaaggaatagggcgaatgtgtgccgtggacagctgtccgggctgaaaatgaaagaacatgcagtcgagaaatattttcatcatccatactggagaaattatacttcaacatatcgaggatcgatcggaacaatgcaggacgcatgaactgggtggaactcagattcgggggagctgagaattgtctagggatcttccctggtcggtggtttgacagcttacaggaagggcaaaaaggcttctgtttttattttatcccgactgcggttttcgctctccaattaggtgttctgcacgaggctgaagagggtaatcttggatgtttcatggggatcctggaccagatgtacaacattctaagatgtaagtgtaagtgagatgtaagtataggatagaagaaggaacctctgctaaattgtccacttcttctatatctcttgtacggagtatgaagatgaagtaaaatctaatcagctaacctgtttctttttatagaaggccttggcttgtgattgtttcttttccttcgtactttcgccttaacggtgtgtgttggcatcttcgggcgcaacttcactattcttacgcctttctcgcctttctcgcttaacaccaaatacgtctcatccctttctcccttgaattccaactcaaagaatacgccccgcgctagcatgcgaatatgcacggggcgaagtgcaggtcccaaaaagggggccaacccccgagaagcgaagccaactcgtattttggcctggagctcgccctcccaagactaactcagggctttggaccaatcaaagcagccccattgacatcttggcttcgtatttgaagacccttggcctcaatccgagcaactgcactcgtgcggaggatttgcttgagccccctgatccatttatttaaatgccatccatttcgtaaaatctggggaaattgttagatcttagatttccccagagctaagcagaacaaaacaaattgcaaaaatggcgcctcgacgcggcagcggaagctattccagctatgtcgacgataatccgtggagcgacacgacctggctgtcactggagcattactacccggacgaatacaagcctctctttatcacccaatttgtctttgatatcatttccctcctcgcgttcgtcgccttcctcatttgggcatgcagaatcagaaatcgtagtctcccgctgaaagcactcatttgcgctctgatttcctctatatggtatgtggaaagatctggactaaataaacaatccgctaaccagtgggtcacagctgccaaataaacatcatcgcctgggaagccctatatgtggctgaggcgcaggtgacgatgtactatttgatcagcttgatgctctgggacttattcaaagtcgttgcgatctgcctcaccttctatgtcttctggaacctcatccatcgcctcctgggatttattagagtctccggcaagccacacgcggcagtgaccaccatccattatctcctcctcggtattattttcgtggcctctcttgccgaatggggcatgtgtgttgcttcttacgtgcgaagcgtggtttccactctcaacgccgatatgcagtggtcctggacacagctgaatgtcgcggtgtatatcatctattggctgctgtcattggagattctcgcctggggaatcttcctggcgatcaaggctcgcagctatgctttctggtcaaaggtgaatctcactccaatagtttctatggtatacaccaactaattggctatcagtcgcccgctatggcactcgtcgccgctgccatctcctggtgcgctgtgtgttccaccctggccatcatttacattcgctatagcctgatgcctacctctgcatatgactggccgatatacctggacgccgccagaactattgtaaagttcgtgctctgggtcggcacttacactggtcttctcctgtgttgtgcgaaatggcacaacctcgaccaggggccgaagtatcccgcacctgattatcagtctcagttccccgagggacactaccctcagattcaacagccatatgatattcctccgtacgtggatcattcaacacagcaccaggcccacccgcaccatgtctcgacctagtaaggttcatgttaaggtctgattctgctgaggtctactgattgatttcctatgattttgactttgtgagagtttctattacagtgatacttcttttaatgtgtataccgaccgtttaatgttgatacccaatacgatgcgaatgatagcaatgcaatcctttttgaacaaaacattgtatgaagcatatttccagtatgcctcaaataacaccctagaacctagaaaaacacaataaaccaaaaaagccactcataaaacatgaagaagcaagtagacaaaaacgtcttggcagaccaggcggtggcgcaaacccgcgacaacatcatcttcattttcgccatcaagccttcgctcgatcaacacccactttcacatctcacaaaatggtctgctcaaaatgccagaagaagctcaaagccactgagctcgccacccccggcgtcaagcgcaagaacgacatgtactacggctcgccgtctagtacactcggtggcggcgcagacaagggaaaggcgaagccgacactaggcgccacgggaatcggaaaggtatgttacagaattttctgtttgatactttgaattaaggagaattatcactattctggataagttgtatactgacattccctccagagcaagctcctcagcgcgaaagcgaagaatccttatgcggcttatgcttcgtcttgtgataactgcaaggtgaagacggagatagggaggaagttttgccagcggtgcgcttatcagaggaatggtatgttgctgtattatttgccctttgttcgttgcatatgctgatatcgatactagcctgtgccatgtgcggcaagaatctggcggggaagtcggtcaaggaccagcctattgtccagggacagaagttcaacatggcatgaagtgcttgtgggttagatctgggcgattacagccttttattttctgttttacattgcatggcgttgggcgttgacgataccgcggaatattagataaacatcgatattgaactgaaatgaacttgatttgacagtgtaggaaaattctagttatacatggcatgcgcaataagagtatatgcaatgcgacaccaatggtgcgctataagatcggaacaagtatgccttttcatctcctgaagaacattgaacctcgcgttctccttcccagctcccttcatctgcttccatcacctcttaacggtcggccagcatgttcttgatgttactgtagtattgcgtgttcaagtattgcgggagctcctccttggcgagccacttgaagtccttgaggccctgggtgttgacggacagatcggcctggccggccatcatacgagacttcaaaaagaagatcttgctgccgggaacctcgatcttgttgcctgccttcttggagtggcgggggttgaaggagtgccatccgaccgggtggaaaccgaccatccaggtgttcatgttgacaccggcggactgggcgagggtgcgttcagcagcctagagtaaaatagtattagtatgattcctaaactcaatgcggttcaaaagtatagcactcaccaagcgaagggtctcgcccgactctaccggcgagctggggaacttccagtgtccctccttggactgaacaaggagataaagagtacgggaaagcaaacgatcgagactcttttggtcgttcttcttgtctgcctccgtgatccgaggatacggccgaggaatttcttcctttttgctggtatcttgggaagtcgcattggcagtggattctgcgtcctggacaagagcctcaatctggtgttcaggctcagactcctgtgctcctagcaggagctcgtcgttccatgcatcgctgtcgtacgcgttgtaatgtccgatatcacgcgcggcagtccggcgctcctggatcttcttcttccagtcttcgtcggccggtgttccgcgtttgaagtagaaatatttcgtaaagggaagggcgagacgctcattcagtcgtttctggtagaaaaagaacgctttctcgaacggttcgagttcacgggtgatttggggagggcgggagaggactacaccagcgttgatgatgtaggctggcttcacggcggagtcggccgctgttgatgcggaggtcgattcgattgctggtgctgccgaggaatagctgcggcggctaatggtctcttgacagcttctgcacacgccggagtcgactattgatggccctgcgcgcggagtcagtatcaggaatccgggcaaaaagttcaattggacatacgcaatagcgaggccacgcgccgtgcaccattagatcctgacgacatcttcaagagtggaatggcaatgtgtttggggctgatcggtgtcttgtctccccgagaaaaagatccaaccaggtcacgttgtcgccaggcccgattgggattagtcaccgcccgggcgctttaaatttcaaaattcgacttccactttcttcccttctccaagcatctcttatcatcactgcgtccagttctctacggccggttgatcatttaaaggtgctcagagtgagctcctcctgagatcgcggccaattttcgctagcggtaccttcttaaaaaatcaaggcgtactgttagatagctgccgcgaacatccccttagtcttacggctgtgtgctttgatagaaatccatttttaccattttaccttcattcttttctaatttctcctccgcaagtatttccagaaccaacacctaaacctcccctcaaatctccaccagcagctcttcctgttttggcacctctcttcctagttgcaccatcctctcctgtgtaccgaacacccgcagtatgttgccgtaggtatcccagaaggcatctccaaggcgcgggagtaatttgccctgatcgaccagacgagcgatacgcccggaaccagtgtcggctagggatgtaccagcctgagcgatctgggctgcttgaatcaatgggattgtctcggtgtcaacatcaaagaagttgttgaattccttcttggtaacagcctggttgttgctaggctgtgccatgataccggcaaccaaactgggtgctgtggtcgttggccggcgtttgatgcgttgtatattgcctgccagtttgatgaaggccatggcggcaagcatgctatcgtatcctgcctcatgggtactcttacggaacttgtacttcgcaaagcgagggtcgatctctgcaaaatgattagctgtgctcgcttgctgtcaatgatataactcatgtcctacctatcttggggctttctattccagctaaagtcgtgttgagatcttcaagcgaagacatagggtttagagagccgcagtcgtgagtggccatgtacttggtatccgctagcacggggaatagctcgtggatggcggtctggaactcggcgagggtattcggcaacggacctaagaagcatgcgtggaagaagagcagatcgcagaacatgttgtggccgactagaatcggtctgttctctttgagccgactcttcactttgtctgacaactgctggattccgaaagtcggctgctcgatgaccttcatcagaggatggaaagcgtctgcttcaagttcgtccaggcttccactcacaagcgcttctgcgatccagcggaacccgatatgcttccggattcgttcctttttgaccttcaatttcgcctccaaggtagactgctcattgcatgggtcccgcaattcgatctggacgaacgttgatgcaccccgcgacgttaagttggggtattcgtcgctgataaggtggtgtatcagccatttctgcatgctagtcaacccggtaggtatgggtcctggaacaagctggatgctgctgggtggcggaatgttgagccactcgcggcgtttctatatatgtcaattgatgtattcaaatcaacgtttgatacaacatcttacctcgccctgtgccagccactcattgacactgacccgaacggcctcaaggaactccagagattcatgatcgtctttcttaatatccacaacttggacagggttccgttggcatttctctgcagctcttctgattgccaattgttcttcctctcgagataggtatcgaacaccgaaggtgcacatgtggtcaatgctgaagtggttagcaagcaagaattccattgctgttcagggagatattagcgtatgctcaacatattgtagatatcggacatacagcggcttccgaatgtccagtcccgattcaaatccatctcacgctgggtgattggactcagatttatgttgtacggtttcagggtgtaggtggctatagatggttagcgggacacgtcttgcactagggttaatccgtacctttttccttatcttcatgacaagttgtcagcccaacttgaagaatctgataccgctctgcagccaatttggcttccacatatcgttcctgcacagtctggggccgggactgtggtgtactggatttgaaagccaccccagacagctcgaagtctacggacacgaagcagctggtggagatgtcgttcagtatggaggataggcaatcgggaaaggtgacagccgtgatatccatcttggttcaaagttgggaacagcaccgaagtatgagcgtagtgaatgaagataagaggtgaaaaggaaagagttggctttgttgaagtactgattgctagacaaaagaagagtatgcattaggaaggcaggtatccgcgtttaattgatcacaaagagcactgcgttgcgtgtagtttgtagaaagggtgatactttgtcgacagtcgacaggatgatatagcttgaaagtttactggtctacgctgttgagtctgatagaccagagttgtgataggagcaaagaagaagagagagatagatgaggaaatagtgatataatatgtataaaaatttgaagcatttaccagattctggttctctatagatagcaaggattgaatatgcatctttttgtcaagaaatccttcgcaggttctcaaagtacattctctattgcttcagaaatacagcatatagcttcacaagcaatatctatcttaaccctaggagttagctcagttggagtgtataaatgaccgaggcaacatcctggcgatgtttatgtccaattggaatagcacaggctgttacctgcgatgcaataaccgaaaaattgggaaaattggcctagagtaatatagaagtgaagcgcctctttttgaacctgtctagggagctaaaataatcgtgaattgagaagtgagagagtaaacaagcctacctgaggctacatagacgatctcacaggccagtcccgtgactgaccccggacttggacgagccgagggaaaacgagagagccgatcacagacccgacacgctttacttccaagcttgaagtttttccctttataattactgcttatacaactttttgaagatcgaatttgacctattacatctcggcctccccaatggcgaacggaccctctgcgtcgtcgcgctctcacgccccatcctcagcttcccccacaaagttgtgctccaagacatacaagaaagcctcccaactgtatctcacacgacgcttaccagaagcgctcgcaaatatccaaccgattatcacgccttcagtaccagaggaccagcaaacaaatggcgacagctcaacacctattgcgccgattgccacggccgctggcacgtggaggatcaaggtgtggaacctctacatcaccctccttagcgcaatagtcgatctcggtgcagaggagggaaagaagcaatttggtcagaaggagtggaaatcaattgcgtcgcaagtcagagaaggtgcgatttgggaaactgtggtcgaggtcggataccaaggccacgagggttcggtggatcccgaagtggtctacaacctgttagtatcagctcactttcctgcctaaatcgaggtactgacaacgcgatcctagtgctaccctccttctaacccactcctcttcgcaatccctgaaccaacagcgccttgagacctatctctcttcctacggacaacccaacctcgacctcgcaggtcgcctacacgatgcttctgatgattacgagcagcgccctattcgtgcgacaagcggagctgatactccgaaagatctaaatgccagagtaaagattatcgagctctttaccttgcacgtcctcccccgcaatgacgagtgggaatactccaccgaatttatcaatttgagcgaagtcctcgatgaagaacgcaaagaactcttcctccagacactcgagggcctgaaggaagagaaggagcggggtgaaatgcgcgcagtcgaactacagcgagccaaagatgtagagcttgaacggaaacgagaggatgaacgtcgtgaagccgaagaagcagcagcagccgctgcgcgagtacagtctagtggaaataagcgcaataccagcgaagtcgactatgggatcgagaaaaaccgcacaaatggttctcccaaaggcaaaggagccaggcaaccgacagacaagtcgccaaatggcaagtcacgagctcccgtctcatcatccagctccaaaaatgtcaaaaagcaggacaaggctgaaccccggggtcgcccaactcaggccgtggccactggcgtgcgcaacatcttccgtcacattatccgaactgtgtctgggaatcccatgtcaatagtgcgcatcctacttttcttgatcggaattacgatggcgatgagcaggcagggtgtgcgcgatcgcatccgacggattacagacggcgcttggcaaaaggtcaaagctacagccggaatgggagtcaaagtgagctatatctgagatataagccacttcgatctctacgcacattgcatggttattctgtacatttttcttgatcaagttggctctccatcattcttggaggttatttttgcataatgtttcttttgtgattccctttgtgattctctatgtccatgtattctacacatgcataccaccgggtgtggttgaatttacttataagtccgatttcggtttgttttggccagctattttcaaaggtaatcctcgtaaagtgcctaggctcattgtccagtacgtggcccatcaagacagtaagagatcgctgagctttgaatgttgttatgtaacctagctattctgaataggagacttgaacaatcactggaacatccaaagcctcgatgacatcgaagaaaaacaatccaagactcctcaccgtcggaggaatgaaaacaatattatattctaaacgggtatcaaatagtcgtacgctcatgaacacgtcctgcgtgatccccacataaattttcagccataccaatctcaacatcatcgcgcgtagtgtcatccaaatcctctttctcgatgactctagcatgccaccaccggaacatctgaacgaagaaatgcgccacgcagatctgctccgtggtgtagagtagtaccggcaccgatgtcttcgcttttatgaagagatcaactggctgccacattgcgtagagcaacgggataccaagtgcggtgctcttcgctggtccgcaaaagcaaactgcaatagtttcctccggagacatgcgctcgaatatgggcttggaccagcgtcgagagctgaagattcgcggtggtctggagcagaagaagcatactgccgttaaagtgatgtaaagtaggatgttgaataggaccacgaagattatgctctgcgcggaaaaggtttggagagctcctgttgcgaagcaggaggagaatgtggccctgatatttaagaatgcgggttagaaagaccaaaaaagagggccaaggctttcgtatagaaagctcgttgtactcaccagatcaacaacaataagcagacagtagacaacttaggcagcttggtcttctgcatgacatacgcagtgcgatcaggccaagtccacctcaccacctgcccaacgaacagtggcagtaacacactgagtcccaattgcttgaaaacctccctatacatacttcccaaattcccacccccataccgccagggatcaaactccgccctcttaggtatcaacgcaacagtccaagcagccgtaacaaacgggccgagaatattagccaacaagacctccaccaaagcagccgcatcatctccacccgcagacctcgtcataacaacattggacgcaatcgtcgtcggaatacaagcagtgaagatataccccgccagcaccgcgcgatcaattttactccccgtatcggcagcgatgataatatgcacgatagccagcaccagcgcaggaataaacagaaacgaaaccgcctgcacgatcaagtggagtcgccaattcagcacgtgctcgataagcttctggcgcgggatgctcaatcctgagattaggaagattatcgcgatcacgccgtacatgatgctgtattcggagcggatgatgcctccatgcttggccacgtttgggaagcagtatgccagggcgcacacgacgccgatcccgattaggagccattggcggaggattagacttgcgatgcgcttcagggcttgctgccaccgtggctgtgcgatgtccggggctgcttccattttctttttagtctaggaatgatggcatgggtattgtaccgccgtggatggattttggggtatgtaggggatatgtagggggaaattttcgtgatcggggtaagtccgacccatcggattcgatagcgcgcacaggaatcgcatcatctgaagctatatgttgtactattacaatgtacatggtggtatccatcatggataagtgtatattttgcatctttgtatgttgtatatcaaatctgggaatccaaaacgggttgccgaagtcgggtagccgatgtcatcaatcgggtcgaatggcaccggagacatattcgtaatctgagtcaacatacggaggaactagatcatgctgacactgtcagtttcatatcttgtataattcgttatttggtctgtccgaggtaactagatctcttgtactccatacaacaaagtccgaacaaacgccgtgcaaatgccactataaattcgggaaaacgttcatccgatcaaaatgacgctactatcaacgtcactgccgcaacaccttgcccatatatacattccaacaactgaacccctgactataaacacaaagttcaagcctgcagcaagccccacgttcaacgaaccttggaatactttaattatctgactcagaacgtcccatgaccctttctggggatggacctcggctgaggggagatctcgcgctggtccgagatcacccgccagcggagttcgatacttcgctccgaattgtaagtcccgaaatattcagaatatccccggagtaatgagctccctggagaaattaggcttttctggactgttgtactccgtagtctacgggtagattgtgtataagatgatattatacattgtaactagtcgaacaaggcacgggcgttttctgtactttctctccccctacattgtacgatgtaatctgaatctcaaggtaccgagtataatcacaagccgtcaacgtgataacttggacaagacatgtgaaatctgatcattaaaaatctggggtcattcattccgctgagaagagagccgcccttgttgccgaaggcctcgggattgtcgtgaagcgccctacattttgtgctcggtaccaaataggacataattattatacatatagagatctcccctcggcaagtcctggatctgtcacctcttttttttccctttctttcttctctggtcttctcatctgtgcgtggtcatacttccgttcgtccagcttcctccgcttccccgtcatagctccccacaaagtttggcaccgttgccactcgccttgaatcatataccctggaacttcgccttttctttcctgaaagattaaagatccttgcaattgatatcttgatctttctttcagatataccatctcttccaattgttcggcttatctccggaacggtatacttccgcacttctccacattctcggctttttctcgcgacaatcggaacatctgcgaaacttgattaccgacattgaaggattcctgtgaaatctttgtgaacaaaagtgcaatttctctacagttatactaaaacatatcgaaacaatgtctgccaaaaatgtcaatcagcagaagcgcacatcgcctgcggtcaacttgatcggtatgtagcatagactcactccccctttcggggtcgtgtacggttattgacctatgcccgattagctggtggtggtgccggtatgatggaggctctcgtgtgccatcctctagacacaatcaaggtccgcatgcagctgtcaaggagggccacagcacctggggtgagttacggaatttgccattcgacaatcaaaagccattgctaaccattttcgctggatcaggttaagccacgcgggttcgtggccaccggtgttcaaattgtgcaaaaggagaccgctatgggtctgtacaagggtcttggtgccgtgctgggtggtatcatcccgaagatggccatccgattcacctcatacgaatcatataagggcatgctcgccaataaggagacaggcgccgtgagcagcaaagccactttccttggtatgcgaagcgttgaaaaaaatcgaaaatgcataatggaaagctaacaatccctcatagctggtcttgccgccggtgttaccgaagccgtggccgttgtcaaccctatggaagttatcaaaattcgtctgcaggcccagcaccacagtttggccgatcccctggacgcccccaagtaccgcagcgccccccacgcgctcttcaccgttgtcaaggaagaaggcttcagcgtcctctaccgcggtgtctccctgaccgccctccgacaaggaaccaaccaggccgccaacttcaccgcatacacggaactgaaggctgctctgcagcgctggcaacccgcctacagcgacagccagttgcccgcttaccaaaccaccatgattggtctgatctccggtgccgtcggacccttctccaacgctcccatcgacaccatcaagacccgtctccagaagacccgtgctgagcccggtcagtccgctgtctcccgtatcatggtcatcgccaaggatatgtggaagactgagggttaccgcgctttctacaagggtatcacccctcgtgtcatgcgtgttgctcccggccaggctgttactttcaccgtctatgagtacctcaagggtaagctcgagggctctaactggtctttcgttggtggtagctttgatgagtaaatgtgccaaaatgtcttgttgttttctggaaagcattgtgatacctgacttggcatggtgggagttgcattccctgtttcgcgcattggactctggaacagaactgttcattgcaagccgcttgaaacggctctttgtgtaaatattttgtgctttgcgttagttcttttctataccactttggtgcgccttgagctgaaatagagaatatccaaaaccattgaagagtcgtttgccagtgtagtaatttggtgttgagggtctgtccatgaatgacccggttgtagatacaccagtcagcaatgcttgtgtaacaaccacacaagaacatattcctatcgagttaaaataacacaagttttttctcctttctgtattatagactcgttggatgtcgaaataaagcccaactgggcagccctgacggctgacaacgcgctatcggcccctcattattcaccgcttctcccctcataaataacaaccaaccaaccgagctgcatcctacagtgcagcatcatgcagtcaggaattacaggtgagacattcgaattatttgatcttgaactctgaaaaacccccattgaattcaacactaacaaacatctagtctccgcggagctgaaagatgcattcgcccgcttcaactccgacccctcaaccttctgtctgcctgcaactattacagcagagaccctaacgccgctggccccaatctccttccaaggaagcccatcggaaaatgccttcttttcagccctcccccagctgtcctccgtcctccagcctaagacccccatctacctccttctccggcgcccatcgaccgccgcctctaccgctccactcatcgctttgacctatatcccgtataatgcacccgtgcgagcaaagacgctctttgcttctactcgctcgacgctgacccgcgagttgggcacggagaagtttgcttctaccgtctttgctaccgaggaagacgagattctgggccaggatgcgtggcgcgagcgtgatggcgagggccccaatgctatctctcgtgaagatatgatgggcgagaaggagagggagctggatgctgttcgtaaggcggaggccgaggcacggaatggcacccccgggagagatattggcattggtggcacctttggacctgcctctggctctgggatgagggtttctctgccggttcacgaggaagctaagtctgcgctgagggatctacgccatggtgggttggtacaactggtaagttataccctgcctcgtccggatctgtgaaatttgaggctaacttcaagcagactgttgatatccccacggagaagatcgtcttggcccactctcactctgacgtcgaggcacactctgtcgccacacatatctcctcctcttcgccgcgttattctttctatcattaccccgggtccgatgtcgtgatcttcgtgtacacgtgtcccactggatcttcgatcaaggagcgtatgctgcacgctagctcgcggagaaacgccatcgcggttgctgagcaggaaggactcaagatcgagaaaaaggtatgcgtgccccgttgtggatggtcgtttcggatgctcacaaatagcagattgaggcctctcaccctgacgagatcaccggtgatcgtttgcaagaggaagtcactccatcacgagaccagggtcctgcgcgaggatttgcgagaccccgtcgccccggccggtaaatcgctattgtatagataggctatattcttgatgagaccagagagcctccgatccgatagttgtagtaaatatagcagtactgtgcttgactcgccaggttattgtctgaaactttggtagattcttgttctaccagcaaaggtagaattggatcaatggttagacattgatcggatcctcatataccccttgaagcgtacaattctcacagataacctgttcatatttgatgtttcctggatatctgtagccgtggccagttttccaaggcgtctaatatgatcctcttagttattcttggtgtaggttgtatgagcaacagaaagaatcactcgaggtcaccaagtgctggacacatgactggtgatttcctaattgatttgatgagctcgacctggaggtataaaagggctccctccccccaaatcttcctcttctcttcttctctcctccacatccctctgaacaccatctctccgtagccccatgagatagggtcagcagagggtcccgtagcacatgctgcctaacccaccacagggacatcaacatcatcatgttgtggaagtccatgtaggtcagcaacaaatatcaaaccgggctttctcgtggatgttcctgaagttgtggctcacattgccacttgacgagtcccacggaatacatgaagggtgtaaatctccgtagccgaagacttgtaggtagtcaccctggcagaggtagtcacatcactagagagaataattgattgctattatactgatgtccttgccatgttgaagtagtttgggatgaagcatacgtggatatttgttatcatattgccttagacaatcctactgagctctaggacgaatctcacgtacacatatcaaatcaagaacgaaaactcccgggtatttgtcagtgtcggcctaaagaaacataacttggcatgaaaaggtcgactatggtcgactataaactaataaatcacagtgtcctcgttatcctcaacgacctcgcctccgtcatcatctcggtgggcatcatgctgatcttgaacggcactttcctccacgttggcagtgacttcgtctgttttggctggatcggaggtttggcctttggtgtctacaccgaccgtatctggagcaccttgagctgtttccttagactttgaatctgtcggatctgcctcgtgctctggaaccgatggctggtcttgatgaccacctgtttgctgctgctcttctgacaattggggcttttcttcgcttgcaggttgttgtgtttcagcctgagttggttgtgtctcagcctgagttggttgtgtctcaaccagcattggctgttcgggcacaaatgcctctggtggatatcgggcttcaaactcggcgacttctcgggcaatagttgcctctgcttcttcgatttgttgttttaccgttgaatcgtcgccaggtcggggttgccatggtttgtaatactaaaatgaattagctgatggctactataatatgaacagcataactcaccagagccggctctgcctgtgtcttgaagaaatgtgccatagcaagcatattcgaatgccgtgtttgcatctgagaatgagaagagtcagtaaaaacttaatcaccatatacctcattggtatgtaagtggatagatcatgaacataccgcttctcgctcatacagcggagtttctcttctgcgaatctcatcccgctgttcctttcgccgtttcttcaattcaccgaactcggcatcctgtgatttcaacttctcttgctgctttttttcaatgtcagcgcgacgtctctgtgccgcggaacttgagctctgcgatagagtaccaagcagccccccgaataaccgctgaccccgcttgcgatcctcatctcgacctgtgcgcagtcgcgtaggctttttctccacagactcatctgtcgcaggtggaggggatgacggccggtgccgctgagaatgcggggaggtgttgtctgtagagctgagtcgtcggcgcttagtgtcgtattctgcagttgaagactttcgtcgcttggctgtcaactccggagactggatagtatcctggttgggaacggccactgcagaagcgagtgtctctgggctgtcaaagtaatatgcgcgttagctagagcgctccaattacaatgcgcgcgcgtgggttgtacggggtgatgaaagctacatacccttcagacatggtgatcggcaaacaacgctggttgtaagaaagaaacaaactggtggaagaaatgagcgacgttaagtgctccgatccgggtcaggtattggagttgttcaagaggcgcaaaataacgagacatgttgcatagaatcacattacttggagtcacgtgcacctaccatttagttggggcgttcaccgtcggcttttctttttctcctcttacttcccagcgagtgccaaatcatacttcattccactttctacagctttaatattctcattttcctgttacgccactcaaatcataatgtctcgtcaccaccccgatctcgtcatgtgccgcaagcaacccggcatctctatcggccgtctgtgtgacaaatgcgacggaaaatgtcccgtctgcgattcctacgtgcgccccacgactctcgtccgcatttgcgacgagtgctctttcggaaactaccagaacaagtgtgtggtctgcggtggcgagggcatcagtgatgcgttctactgctttgaatgtacgcgtctcgagaaggatcgcgatggatgccccaagatcatcaatctgggaagttcgaggacggatctgttctaccaaaagaaaagtttcaggaatcaatgatcttcaagagaggcttgtggcttggtgtccaagtggaggggagccaagcatgagtccggcgggtttacaatgttcagcctaacgacaaaatgactacaagctttacaactgcgagcacgtgaaaaacatcctgtcggtggactattcaaacctgctccgcgaatgaaggatatcaacgaacattcggacccgaatacaattcaacgaaatatccctgtgcctcggactgcttttgcagcatcatgcaacaatacccgacaagctggcaggcatggtggtaacgcgcgctgtactatcaaacctcgaggattcgcaatcaatacagacgatttggcgactaggaccagcggggctctaggtggagcagctggactggaagcaacacctgcagggttcgtgactgatatgtctcggtctcggtcatgtttcgtcgattatccagatgggtatggcatgatccaacccccaaatatgtggcttcaaggcggtcttcataaacattatgatgggtgggctttgattgagggtccctatctccaattccaattctgaataaagccatttcccatgcatataaactttgccactgtgataacttccgtctgctgttatgtaataatatcttcgacttttgtcaaacttgatccattctccgtctccgtggccacccatcctttcttgaacacctatgatcttatcaggcgtccttccttacaatgacaatcgtctatttcgatatttggaaagtactggccgcctagaatagacgaagaaaatgtaatttgcaacaactccacttgcacagaaacatctgtcggcgtctgtatgttggactgtttgtaactgggaaccactttcatcagtcgttcgagcattaagatgtcagtctcaagtccagccactttcggaatctcctagcgacctacctagtccgttacatttttgcatctcttcatcgtctaactttgagtgctggcagcaatggtgcgtatattcggattagagatattggcaagctgggtcgtttcctacgaagcagcgcctctcgaggaaggcatgaatctttcctcacccgagcccaatgcaaatcgatattgctgtgctagccgtacgtctaagaatgaacctccaatatatctgtgcactatgtactccgtgcatacaacatagaaggatgtagggtttatagagtgtcttggcgccccactaattgtttccaacgtgccgaggcacacctaagaggggtatgtcatctctccggcatgagatcctctccgggctagtttcatgcatgattatatatcttttattactctgacgccggttttccttttgatctgtatcggtctcaagttgtatagatgtatttatcgacttcacctgatatgtggggttgcacagctacgggattaaatcccgcatctagtgcgggtgatccgcatgacatatggtattattacagatagtttcaattaaaacagcaaattcaattaattgaaagtgaatgggtttttattctactgtatttttggtattagtattacactgtggaccctcggggcctgatcccgggttgtactttaacgcttggactctaaatagcccagacggtggccacgaatctgttctccccacataaacatccctttcccttactgaactgaagacataactatcattgcctgtatcaattcgccatgccagttgacaagatcggagtatcgggtgactcccgtattgagtataagaccgccacactcaacggccataactactgtgagcatagcatactttggagaagtctttctccagaataaatccgaactgacgatttgcagcttaccttctcagccagcctaaatcaggggaatacgaaagcactgtttttctggtaagcggctagctcaatcataaagccacacacgttgacatatcttcatagatccatggcttccccgatctctccatcggatggcgatatcagattcccatgatcgtagacatgggtttccgggtagtagctcccgactgcctcggatacggacgaacagtgagtccttctaccctaagatgggaatgaattatcatctaacaatccaacaaggacgccccagacgaaatcgccccgtattcccacaaaagctgcgcagcagacatcaaagccctagcaacccatctaggcgaaacccaaatcatcctaggtggacatgactggcaagcaacactgggcaaactccttttcccagaaccacaaagctaatacacaaagcaggggcgcagtactcgcttaccgcgttgtcctctggtacccggagctagtaaaacatatattcacagtcagcgtgccttattcaccacccatgaccaagaatatctctatcgaatacatggtccggaacttgtcaccgcacttcgcgtaccagctacagttcaagagcgagaaagtggagaaggctattcggtctaaggctgagattcgccagtttctgattgcgctctatgggggtcgtacgcaggagggcgaggtggggttcgatgccaataacggtgttttgtttgacaaaattggccagttgaagccgtcgaggttgttgagcgaggaggtaagcgggcttagttgattttggttcggggttggggtttttatgttgactttctttctctaggagttggatttttacacggatgaatttgctcgcaatgggcttcatggaccacgtatggtctcttctgggttcgttcgtcggacgcttgctaattatctcaatagttaattattaccgcactggtgacttggactatgacgatgaacttcctattctcgagcgcggggtccaaattcctaccctgtttatccaagcgctgagagacgaggctctgccgccttatttgggtaaatctatggggcagcaggtcccacggctgaccctggagcaggttgatacttcgcactgggctctgtgggagaagcccgaggaagtcaatgagattattaggtcttggttgaatcaacaatattttgctgatggaaggtctggcaagctctgattgaaggaacgataggtatagtggcacagtgaaaaaacaggattgattgattattgtgaaaatacgtatttcatatcggaaaagtaaaaagaacatgcgcttcataacaagtcgagccagcatagatgcacaaactgggactcaccccgtaacgatcaaactatttagtactggagaaccttagtatcaattatgcagccgaccctctctaagcggtccacgtagtcctgacccagcgtagcgggagtaacaatgccaccgcgcgagacctttttgatcttctcctcctcgttaagaataaccatagcagcctcagccagcaacagtccagtaaaggggtacatggcgccgtggtaagtgatcttaccgaagacgcgctgtaccggagcactctccgcagtagcgatggcatggtactcgagaaggtcatttgtcgagtcctctctgcgcggaccactgccaggggcaaagacgaacttcttcaccagccagcgcaccggcgacagcgcaagcagcgaaagtgcaaccaggaagccgatgtgaatggcgacgccaaccagcgcgttacggaccgacaggaactgacggaagacgaattgctgcccgtacagctctggcatcaagctgctgctgcgttgcacgatggtgatgtcgcagataccggacggggaggtcgtcacggtacccaggtcgcgaattgaacgcacgccgaagatcttttccaggattgagtcgcgagggatgtttttcggtggcggggatgctgccaatgagaagggagtcattgacttggatagctcggacattgaaaagccctcgaagatggttagaatagtatttatggtgccgccgctaggaccggaggatctgttgtgaatggattagaaatgggtttctttgtggatatgaaattgcatacctcatctctttgatggtgctgtcaatctggcgggttgaagacgcgaggtcctctcggactcgcttaaccagagaccatgccaacagatcagcaggggcactctcgacaccgttacaagggatcatctgttcgcaattagcatgaatgtatcttataggaattgggtgcagaacgaacaatagcgccattagccttggcggtctcgtggtacttctcgatgatcgacttgatccagggtgtttctccagaactgtaacgatcagcaagtgtttgaatcagatatgaagcaaaactcacacatccacatagtgagttccattgacagcgcatgcctccacaactggggtcgagtacaagtggtatggacccacacagttgataaccagccgcgttttcagggctagctcgttgagctcgatagagtttagttgaacgaccaggacatctatgatgaccccagggtgagcattgagatataagagctatagaaaaatgggaccgtaaggttatgtacctgcgtccacgcggtctgggttaagacccttgagttcctgggcgatagactccagtttctctgcggatcgacctgcgatagcccatttcagatcggtaggaagatgctgcacaatgtgctctgcgcaaaatcggccagtatagccagttacgcccagcaaaaccaggtcatactgtcggttggaagtcatggtggttgagtcgatgggtttggagtttatgatgtagttgtagaacaagggaggttccggcaaatcacaagctcctcggcacgtttcaaaacgcagtgtggggcgttggaaataggagtagttggaatagtcacgaaagagttcttggggctttacatagaaatagaggcaacttatgtcacacaattgagattctaccttgaccagggaaccgcagatgtttatatttcatggcatggaagaatcacgtgatcggatagatcaattagcccgagaaaaggagaccgggggggccggtggtttcgaacggaatcaggccggattgggatggttttgatactatacaaatctattattgtacagggtcatcttgaatgatgttagagggaaagagggaaattatacatacatcagacacctgaaatagaaggcatcaagtgaaaatcaaagttttcaatatcaagtatcaaatcaaacagattcttggaaattctaccaaaatcaaccaggtcacatccaccaacatcgtcatcgcctcatctggtggaccttgtggaccgaaacacaccaagtaagcattggaaacctgaggccatcaacttgctgatgtaagcccactaactcaaaatggtcaggtgatcacaccaagccaagagccctaagcgagaatccacagcacaacccgccctcattcaaagcgtcctttttcggtctcctgttgaatacccatcttcatcctctccaccagccaagatgacgaagcgcaccaagagtatgtgcctctttctcaaattcaacacaccgcaaaacgaattgctcaatgctaactattttctacagaggtcggcatcaccggtaaatatggtaccaggtatgacatttgtctagttcgcgcccacacgactgtgatttcctcgatcgagacacacgacccttagcgaatactcctatacgacgatcaggattctaacaatatcccaacagatacggtgcctccctgcgtaagcaggtgaagaagatggaagtcacccagcacgcccgctacgtctgcacattctgcggaaagaacaccgtcaagcgcaaggctgtcggtatctgggagtgcaagggctgcgacaagacagttgccggcggtgcttacgtcgtctcgtaagtcgcccgctattgcatggagcgacactgtgatgcgacctgggcattgacctgggcttgcgcacacaatcgcgatccacaatgtaccaaaagaggaaagattgctgacagttctgttttatctagcacccccgctgccgctgccacccgctccaccatccgtcgtctgcgtgagatcgctgaggtctaaatgggaggattatgtggtttcatttctctttacggttacccaaaaatgaatgaaaaaattcgggaatacaattcttgttgcaatccgcttcggccccgagtataccgtatatcgatgtgactggttttcaaagttcgtctcggtcgctgcctacatgatagacaatccaccgcaatccagatcctccacctgattaccttcgacgttctgcgaccgcgtgagtcatatggatggactgcatatttgcggccttttgtggtttcgcgacgctggacagtcacgtagactcgacacaacatcggtggtcttggtttggaggtcacctggtcttagcgtattgtctgggtgcttggaccgactgcgctccggactatatctttcgtactttctacgtgcacctgaacatttgcaccaggtgcctagcatactccggcccacatgatatatcctactggtacgatccggtcgcatgttaacccagggctccgggcaaatcgatcttgcccgacgaccaaggtgaaaactgtccaggctgcccagtgattcaggtttcagccaaatcatgggcgcctaatgtagtcatttttaatttgtagatcgacggccaccttacactcgggactctgtgtgtattttgtgttgtacagggaccttgttggatggttgcaggatgtccatgaccagatcagatactcaagcataattagtagccataaaacaccaagtccaatagagaattcccaaaatttcaaatgtagtcatggtaataccaagatcgcagatagtccaaacccgccaatccagggcatcgtacatcattcgcctccgtcacgttcctgctttgcgttagtccggtaatccggcccaccttcaaaaggcgctccccacacctttctcgcttctacacttctcgagagtcgctcttcatggacttcgccttctctaataaatctgtttctcatgtccgatacctgtattgtttgtttaggagaccttggtgaaggagcgggtgatcctcttgagcctgtgagccttgatttgaaggatggcgacctcaatgggctcgactctcagatcgctcagctacttccctgtggtcatgtcctacataataattgcttaaaaccatgggttgaacgagcaaacagttgtccaatatgtcggcgaagtttcaatatggtggagttgagcgatagtgtcggaggtatgacgctgccccttccttgatttttgtgacttataacatggtggttacaagtactgactatattgatttgttataggaactgttacttcatcctacgctgttcaggaccgaactcaagtggccgaagttgacccttctatgattattgaatatgtggaggatgacttgatcgatttccaaccatgtacaatttgcggacaagccgataacgaggatgttctccttttgtgcgacggatgtgatgggccttctcatatatactgcttaggtttgaccgagatcccctcagggtcatggtactgccaacaatgtgaggagctacgtgctcagggacctgctcccgaggtatcagcacggccgtcgcgggcgatcgagcagcggagtcggcgaactagggcccagcagagacgactacagaatcggactcagacgaattctctacactgggcacgagtctggcaatctgtctgggatcatctgaatctcgatcttgatttccctttcgatgacgatcgatctgccgaacgcgcgctgcaacaacgtcgtcgcgaggaggccaaccagcgcgaatttcaagcctggcaacgccgctttgaagtcgctgagcgacaaggtggtggcagtcggtttcgcgatacagcatccctgttcgatcttgaccatgcccgaccatcccgacctcgggttcctcgagttccgacaccagagcccgagtcgctggaggagatgcgggcttggaacgccttcgagagggcgcgggagatcgaaaacaacccgagtgcagccaggaagcgcaaagagccaaccatgtcgccgtcccccgagcccacagaacccgagcgcaagttgaagcgtcctcgaacgaggaggccacaggagctcgcggctcgcgcacagcaaactcaaaatggggaatcatccagagctgggagctccattgtacgaccgagcagtgataattccaccgggccaagcttcctatcgtcgctattgaaggaagtcgaagacgcaccgaatcattcatatggaccttcagcttcgacatctgtcggtcctaccgaccatccatctcctggtttatcttctccctccatctctcccgcctcatctcgttactcctcccctgtcctctcggctacaccaccacctttctcgcgaagccgccccatctccccttttcaactatcatcccccgcccaaccctcatctcctcctttctcgcccgaagtgtccctatcgggtagtccgtcgtcaaatggtgccaaagaagacaaaccacaacggcaagccgatcgtcctcgctcccgcatcccccaacgagcactgtgtttcggggcatcccgctcacctgactcatctcccactcgagctggtccatccctggccctcaaagccgatatccagaaaatggtgggcactgggttaaaacctcactacaagaaaaagaccatctcgaaagagcaatatacgaacatcaaccgatctatctctcgcatgctctacgagcgggtcggggacaaggaaacgcttgagccagatgaacgcaccaacctcgaaacagaggccaaacacgaagtgcagaatacaattgacgcactggtggtgaagagcaaagagaaacagaaacagcgtatggtggcgaccgacacaaacggtgatctataatgactataccacgaactctccccggcatttaatggcgtttcttctcatctcagcgaatcatactccccggcggaacggattggaatgtataactggcgtttgatccttgccggctgtcttcttattattcttcttgtccttcttcttcttccctcccccttttgcggggcatctctgtgagaactattttttgttcgtcacctccttcgacgagagtgattatttctttttttgtggagctagtctattcgcgttctctttgccccatattttgtctaaatattatttaccttcaaccgtaggacgaggtacggccaccttaggtagcctcgccatctttggtttattgggtttttttatctcctagtcggggcttgcatgcatacttgtaaagataatctctgatgcataatttatagggacagtgacgactcctgactcaatcggggatcgatttggctgcacgtctatggataattctaaaaagtacatatagtaagtacaaaggaggttgtggtatgggagataaagctgattttgaacagtgatgccacagtctgacatacgaaatatcccagaattgaggattcgatcagaattgacagccgtcctattgaccacatcgtcctggtagtcgacgcaatttcatttcaaaaccgatagataagtatagtggcaccggtagcgaaagaggtcatagcaataaatccagacaattcttcgaatatagttggtcgttggaaagacaaactaacgagcagttgaccaaaccaaaaagtgagagtcccagccagtgctagccactgcccaaccaatgcaccaattttgggggcccatacagctctctgacaatctgttcgaccccaagatcctcaattcctgcctgctggcagaactgggtcctggacctgcggtgggaagaagacggttgggggtgcataattgggaagtttatggttgtggactgagcaggtcgaacgcaggcagctgagataaccaggtgcatgcatacgagcccactcagccactggggtactctcggttagggggagtgagttgctgtgaaatatataggaacatgtgcttccgaagagggaaggtgggtcttcacacgttgatgcctgaatagtataacgtttctgcctgcagatcatagacacttagtaactatgtagtacttggttagtattataatgtacatatatttctctacgacaatacaagaaaaaagacaaaagcagcagttagtcggttaaaaatgaaaaaaaggacaaaattcattgttaactataggaaaactgatctgcttcaccataggacttccatcctagcccagataaaaagggaccatagatcacattggacacccatccacagttctaccctctgtgttttcaccttgtcaatccatacttcctgcactttctggttcgcagtcatagagtctggggtaaatgtggagatattgccgtagtagggatagaccttgccaggaacaatgccgttgatcacgacaaagcccagctcctcgtcgataaccaggttgactcgtgcgctcgggtcattaggtctagtgttgtcccaactagttgatcaacttggctccgatcgcttatcttttctcatgggtcgtcctaggctggcgctccggcagacccagcaaaacgacagaagttctgtaagtttcctccatgtagctcaatcagaaactggcaattcttgcatggattggcaactgcattccaaaaacggccgctgagggtgtgtttataccgcggtgccctcagcgctttctttcttagagcgaggccgtgaacatttccattggtcgtattaagtccgctgtttatggtgatatgtcaatatagctcattgccgcgagaaaaataacctaccgcaagagatgaactataggatacgtttccgcgcaattgccgatggtttggtatagttcgggcctcttgctgaaggaccatccagacagtgtaatatgctcaccacccacaagccagtatctagctcgcttaacgggtaatcgccaagacccaacaaggcggtctttgtgaacgcacccaccaagcgaagcaccgagaaagaatttattcaacagacctaataataggtccaaagaagtattgttgtcagacgtctcttgtctggagttgctgggattggcgcaatctggtgatatcggggtagcgtagtctaatcgactaagagtcgaaaattctatgcctagctctcttccagagtttgtttgtctcaaggaagacagcctggtcatatgttgtcaacaaggcatgcttgagctgcatggagtcttatatgtgtcgtgcaagctggcctatatcgggttagagtcttgaaccttaggctggagaaaaattcttactgatttctcgacgaaagctccggtcatttgcctttgcgggctcccttctcagccagacagatcatgtgccaatgctcagtccttttgacctcgctcacgattttcgcgtttagatcctgccggggtaatcgaccgatgcaatcagtcccatatcgcgtaccacatccctccatacttgaactgcgccgcgtgaagctacctcatgagccccagtcaagtgctatgatcatgcaccgagtgtcgtaattggacatctatcgagtagagctcgatgaaaacttttgcacgtgttagaaagggaagttctcaatggcggcagctttgacgtcgttccttcctatcctgcagagcgccaagtgagttggtcaagggtttgcaggatttgtagggaccactgaagacccataatggggaggaaaatgatccggcaagaacggtaagaccgttttgctctcaccacctcgataggaagttcctcttattttttatgatcctccggatagctctggtcgactacccgataagcttggatgtatcatgattccagataatggtagctccggcagcctaactctgcatttagaatctgcgaaacctaaatccaactgtttcgtgttgaacacggcactcaaaacctcaccaacacattcttgggctgctcatcaacagctatcatgtgctcgaatgtcattgaggtgggctgcaaccctgaagagacagttatgatgggttgcatgttatgctccttatcgctcgggtgcttgagatggttctcgtcatacttggcaacagtcatgaagagctgatatcgatcttgggatatatgaaagcgcctatatgatgtcagtagtattcgtagttgaccaaggtggctaggggcgaagggaaccaacatattcaatcctagggatggcactgtttgccatgtgtgaggacccgtcattgattggaggaggcatttctcataggagttctgagaatgagattggatttgccattttccagagacattttccagagatggctacacaaggatggcctcgatcagggagaaagactgggtagcattccaaaggtaatggtgaagtggatggggagagagacagcggtggggggaggatctatttatatagcaatatatagcaaacaataccccgtatgtagtgccttcccgatctgactataagaatagccgtcttaccgcccccatacctgttccaggtatgggtctgtcccacataacagaagattgccacataacggaagttttgggattttaggtatcttttatatggtatacccacacaaaaggtacataaatataaaatatacataatagagattttgtcacttctatatataagatatccgagattttttttattagccaatcaattcaactataaatttattcttgattcatactcttatttctcctttaactagccaaagggttgagtacataatatggggtatatgtaccttttatatgagtggctacccgtggacgtagtaattgaccacctaataactagacagaaataggagagtgagtcgccccctctaataatatgctcctttgatttaatatctttgagctgcttaaggatcttaggatcttatgttaaggggatagggttagagtacagagtactagatgattgctttttttttttctgccggctggatctattctgccgtttctcagcgattactctttcaccgactggatttctatttttttcgacccagtagagagcgcctagtcacatgatctcctttcgaggcgttccctccgggtgcccttccggggcatcccttcccagggggaaagggttattttttatagttgcttcgcttcgctccgcaataaagtatagaggtagtgaagccctttgaagaacctatgctatgatatcattggttaaataaaagtggatatagttctcaataggtgggggaggcggggatggtgcacgtgcccttctctgcacaaagctctgacatatgtacaacgctgtgccaacagtggttacccaacttaactactacaactgaactaactacaacttgcaatttacatgattcttcggactttgccagacgactaccttgacagaagtctttttcccacgctgtctgtaatagacttgtgttgacacctgggtcatgtagcccgagttgctctctgattcttcaagctaaatactgcttgtcagtttgttgaatttggatttatgatggttatcacaagttatacatggaataaagtcatcctgaggttccaaatgcaaaatcgctaatatgatctctggccaactggacatccaaaatatcaagtcctacatcactaggctatataagcattcttgcggtgatgaatggagagacacgaaagaaaagaatcaagtgatctaaagtcttaattttaggcattgacacttgcactcttcgtcattccaattcccacagcagctgttgtccctgcgtcaacaggcagaataacaccagtcatccaccgagcatgaggtccagcaaggaatacaacagctccagcacagtcccatccatttccttcggttcccaataagcttcgtttccgacgggcctcacgcgcctcttcgctcatgcccttcccatacatcataggcgtgtacagcatctagtatcatcagcttcagttccatacaacaaacatgttaaacatactcctggacagacacaatttacacggatcccatcgagagagtgatgagccgccatagcacgggtcatgttgactacagcacccttggcagtcgggtatagcagatgaggtgtgccacccttcaacccagcaacacttcccatgttcacaatgctccctttgatctcgccatcatttcgactcatctcaggaatggcatacttgaccatttgtaccatgctggcaacattgatctccatactcttagcccactgcatcatatcaacttccaccgcagtgcccgccgcgcctccaatgccgacattgttgattaaaatatccagtcgtccaaactgttcaactgcaaagcgcaccgcttcttggcagtcttcttcggatgtgacatctccccgaatcgcaagcgctcgtccacgaccgggtttcgagttcacgatctccacggtcttgttcgcccactctaggttgaggtcgacgcagattacgtcgcagccatcgtcggcaagaaggattgaaatcgcgcgtccgtttccaattccatcacctaggcagcctgcgcctgttactatggcgactttgccaactaaagaacgcgatgggggttccgatggaatgccagactccatggttttcgatttgatttggtttcaattgagattaccagttaactataactaagtaaacagatgcggatacagtctaccttatacccttatacttgctgcgtcttttctctttcgcgatatgtctacatattccatcctcatgcggggttaccaaatgccgatatacgctgttaccggtagccgagccgaggtgatgtggggggtaaggtgatggcgctattgtctctcagtgaaatgtatgggactacatttgtacatgaattgactacccctccatgatgcccctctctgagtggctctgtcttttgacttggcggggtttactaaacccccatagatgatcagcttcttgcttatctcttatttccctcccttcttctttggatattattacctttgaccactacaagaatggccgacttcactgaatatggtaggccgagtgccgaatggatcgacctcgagccgacgctgcctaagcttcccacggacctttcggcggaacaactgaaggcattgctaaataagggccgcgagacatccgcagcccaagatatgatcaacatcggtgccgcagtccagctgcacgactacacaatcacagcccgcgacggcgcgacgctcgaagcacgcacctaccgtcccgccggcgtcccaatttccgagcgcctgcctgtttacgtccatcttcacggtggaggttttcttttcgggacactttcttctgaagatgccatttgctcgcggattgtcacctcacgtgtccagaagggtaccccagtcatggtcttgaacatcaattaccgacacactcccgaatatcaatatcccactgcttgggacgatgtcgaagacgcatttgtctggctacacgagaacattgccgagattggcgggatcggcgagcaggttgtcgtgggcggtatctcagctggtgcatggttgacggcgtcgttggcgctggctcagctgcgcggcgatgataaacgcttagcagcctgcccaaaaattgcaggtcaggtcctcatgattccttgtcttgtgcatggggaccactatgcgccgagactggagttgctcaagagtcctgatttgtcgagctatgtgcaatgtgccgaagcgcctgtcttgccggtgactcgaatgagattgttcaccgatcttcttgggattagcgaggccaaggatgctgctgcagatcgtcggatgagtcctggtaatgctaccgcggaagaggtcaaggacttgcctcctactacatttggaatcgcgggaaatgacccattgagagatgagggtctgttctacggacagcatctcgctgaaaacgggtgagtttgcgtcttgaagatttaggtgttcaaaagctaaatatttcattagtattcctaccaatgtgcatgtcttccccggcgtcccccatggatttaggaggtacaagcagctacccgatagcgagaggtgggacgaggttatgagtgacgggattgcctgggcattgacaagtcctttacctggtccatttgagatcaagtccaaataggacactaagttgaaggcggaggatgcatacatcattttgtatctgttagggatatcaacaacatagtcgtagttaccctgctagcgcagccgaatcaagtgtatgtttagcgctagacgagtatagtattaatccaaggaaatcatcagattaaataaagcagacatcaatagaagaataaaggactcgaagaataaaaccaaggcgattcaccgctcggacccacactgccgattgtccgatctggtagccgccaatgcgagtcttcctattgatttactctcctattttttattttctattcaacttcaattgtctgctcattatgcatgtctattgtgcactacatgcaatgtaattctaatccgctttcaatcccgcattgaaataaagggcgggcccctctccgacaaccatcgcttttgcgcaaagcattgcctcatttcttgtgcgcaattcggaactagagctttctgtcctaaaagctcgtatcgtgtcattctctcgtgctcaagcgttgtcccgcgaaacccgaaacccactcatcacaatgcctccttccgcctccaccaacggagcctcctccacccccgacgccctcgaatccgacctcctcgtcaagctgtccgccagctgcgcactcgaagatctgcaggaaaatctcctcggctcgctccatcgcctgggttggaccgacaaggtcaccaccctcgccacagaactcctccgcgccggccgctgtgagaccttcgacgatgtgatggcggcagtgctcgcttcagcagagggccgaacccaccccgcactaggggcccaggtcgcgaacggtgaaactacaaacggaacaaaagagaccaacggtgtcaggaaaggcaacaaagccaaaaatcactcatacgaccctctgaagtacattgaagaaatcgatatccgcattccggaaacggtggtcgacgagggtgtccgtggattgaaggatatcatacgagaagtggccgacttggagggagagagtgcgcccaacggcgacaagaaataatgacagacaccgggcgctgggaagcagcatttgaaaatgcgatcatgcatggcgggtttctttctaaggagtacagattgtttcggtctggctgcatcaaattccattggtttacatacgaagtctacgggcgctcttacatttgaatagactaccaattcacactggggttttgaatatccccctttttcaaagcactgcattttcccttgaagctttggctcttctaactatagctcttgatgacgcagtaggtactccaggccccacaaagtctactcgattgtctttaatccccgcaaatcgaatgttaccgtgaaaaagtatgatcctggcatggattatttctcatcggcttactttttcggatagccgaatcaagccctgcggttgagacgggagacgctcggcaaaggccacggattattagcccgaggctcggagagggacgtaaaattgactagtacatacttagtttttcggaaattgatatactgcagttctcattcaaatgcggcgattgctaatactcttaacaaaagttgtggtattgtcataaccaacgccgacatcagccatgcctctgctgacgagctgtggcctttagatggtgagatcataggagtaactcttttctgacccgttctattattaccactgtatggttcttgccccgccattgtcttcatcttggtcaaactgtatggatcatagaaggctaatacttgccccgtacaaggcagactggcaatacaccagcagtaaatacgggctgagagctctgatgaggacagcacctcaagaagatgttgcaatatgtcttgaacttgcaaccaatagaacaatcaacgataaacatccaccatcacttggagtataaacctacataaactggtatatccggttacaggccactcactaatagtcacgcctaaacctgttttcaaggagggcttcaaggatgttggcatatggaccataccgaggacgggtatctcaagcgcagtcggttcagctagcatcatcggagatcaaagagtgcctggttggagtaaaggacagagggagctgccaagccataatggttcgtaagtgcttggcatcattccaaggtttgatgaaggcgggggtggataacaaattcaattcgatcatcccagagatattgagtttgtagatagtatattccccaaatcaacagaaaacatattccgagtttggaaaaaggaagagatgtagttatactcttcgaggttcaaaagagtccaggcccagtcacgtggaccccgttctcatcagaccagcatcctcttcgcctaatctcgacctttgcgctaagtttgctcccagacgtcagtgaactttttgcttcggagaatagagacgtatcactcgctttaaccggtggccttactttcttccaacgcccctatcccgccgtggtcctgaaccgccaaccttccccgctttcatcttgttgattgccgcgtgtttgcactcgacggcaacacccctcctcggaaaggagttatcgagaacatatttcggccagaacaggagatacccaataaaactcctccctgtcggaagatcttgcgaatccgcccatgtttgacttgaaaccgtcaagtcttgacgtcccctcgttctgcccgcgcgtcaaaagatagagcattcggcgcattaccgccaacactcattttgtttgtctttgctggccctagtaccttggatctggcggtggcgcccgtgaacctcccatatcattcatctctactttcggtgaatattctcttgccatcgaagatctcccgtcatgtctctccatacctcctaccacgccgactccgatgcggacgatgagtacgaacgcagtgtcataacttcaccacaccttcccatcgactcggaatcttctcccacggactccgatattcattcaacagaacacaccccgaccaaatttggacatccgatcgatggtcctcgttcaccgcgaacactcatcacggaatggggagttgatgaatgcaatgaatttttaacatcacttggattgctgcagtatcacggaatatttcgaggtgagcagattccttcaagtatggttaggcagcgctatttactaaccataatctctgacgcagagaatgggattgtcggtgaagccctggttgccctgaagcatgatgagctgaaggaaatgggcatcaacagtgtaggacatcgactgacgattttgaaaagcgtgtatgaaatcaaagtcaagcaagatgttcctctcgatgcagaccattatatcccacttagtatgttcccagacgtcctgatttaaccccacttctaacccgtgcttgcagcggcggaccagagtatgaatgaaactgctacacaagaggatctcgcgcgtttaatcaaatcgatccaagttcgagacgaaaaactcatgctggttgaaacagagttgcgccggatcacagacgattaccgacgattgcgcgaagaaattctaccagtgatcaagatggtaaaagatcggtcacatccattacctccacccacttcgcatggacaatcagaaaactggcacgacagctcggccactctcacgtcaactccccaacccactatcacccaggaatcttcatcatctaaaattgcgcgggctttctccaagcgcatccatcctaacggtaattcatccaaaaacaattcgccaactcaccctccacctacgggctatgatggacgcactcatcacgacacccttaatccgtcaggcactgcctcatcccatctcacagccgggtcgcaactatcgcccggaattccttcacctacgtcgcctcaccaccaccacgctcaccctcaaaccctcaatccacgatcatacacccaaccactctccagcgcgaatcgcaacacatcctatgattatgccgaacagacgccgacaatacattctagagaccgatccactccgagtcagcttccagcatcccgcgccgagacaccatctactgcatcacgtcttgacccacgactcgacaggtctgactcacggggtggtggcggcggcggaggtggaggcggcagcgaaaacccaaatagcgtggaaatcttcaaatcatttcgggtctcttgggaagacccatgctacaaggtcctaccggctgctcttaagaaatacaacatcaactctgactggaagaactatgcgctttacattgtttatggagatcaagagcgttgtctggaattgcaggaaaagccccttctcttgttcaagcagctagaaaaggaaggacggaagcccatgttcatgttgcgaaaaatccacatggacaaccctgcaggcactccagggcctgcatcagcgcctaatagcgctggcttcgatggtggccgacaaggacaaatcaatcttccaggcggtgtgctctgattcttctcaaggccaaccttcgtctgtcgatgcacgcatgtctgtggcttgagatacccggtgattttcgactgcattctttcttccgttgcatttgatttttatgccactggactatgtcgtgatgttggttttgtcggtgtttggtgggccgggcatgaatttatggatgacactggcgtttctgcttttcttgacgcttcgattccagactcgttgatgtcccatgcagcattatcagccttttctttttatttctttcaggatatccttgaccggcataggactttagtccagtgttttttttttatcatagcatattacataccgagcttgtacatgagattcccattgtttattcacatcatctagttacgggtttcaatcttatgtcagtgttttcaaatgagacagcccatatattacaaatttgtacaaagggaattactttttaagctctaaacaatccacggcagactgcatgtatgagttgttcgcaagctacggagtaggccttgtcaggcctaatgtgctttgctaacacttcaggtgcaattccccgaattcattagcccgtatctcctgtaactccatgttgccctaatcttccaaggccaagagtgctctacccatctgctgccagattattcaaaacatcttacgaatatacccaagagattgtgattataatcagcctaaagcaacattatattcaatatctatactaaatcacataaagtgagcgagaaaaaaaaggtatgtgacgtcctccccacagccagcgcccatagggcatcccgaaagataccctagcgtagctataaaagtgttgtataaagaggaacgcctttctatactctccagggccgggaacggaagaaaacccatgaaggccgaagcccaaggataagcctcagcaagccacaaagtggagccccgtgaagttgatagaaaagaaaaaagaaaaagagcaaagacgcgggcgagccggtcgtatttatgtgtctgtgtttttttttctacgctagagctgattgggcctcggttaaatggttattccggacgtatatattcataaccttggaactaagagatggttaactaacaagcagaaaagaattccctaacaaaaaaattcaaagaagaggtcgtgcccgggatcgaactgggattgctggtatcagaaaccagagtgataaccattacactacacaacctgggttgttgtgtggatctcagtgaaagacctcataagccagggggtccacttccttactgggaagtacgcaaaaatagccctaaaagattcggaacgagaattattagttctacctcaacctctgcaggtagaattgttagagctgtcttagggaactcatactcaatgggtagtctggatctcggtagctttttactattcctttttctattctcaaatcagctacatagttgcctttggagcgtctttcttgttgcggataatcttaagggcattcggcctctttaaatgtggatatgaatatgaacaaataattgcccaatagcgacgtccattgatagtatcacattaagtgatactattttactacttgcagctacacaatatttatgattacggagccattgcgattgaagttaataagtatcaatccgaattccagaatgtggacgactttcctatgcataactagggaaatacctcaaaattctttgtaatatagcttagaaaattagatcgagtagtgtgaagttgattattgtaggttctgaacataaaccttctggcaatccatgatcttcctttcgcggttcttatatagttcattccctgcaacaacatagtgagaaaatagtcgcccaactgtagatatcgtatatagaatcaactttcaaatcgagatccaacaaattcggttgtgtagtgtaatggtcatcactctggtttctgataccagcaatcccggttcgatcccgggcacgacctcttctttttgattttttttttgagaattgctgaggctattttctaatcctttaatatagttatgattagttatgtatggcctacacaacttcttaataacaaagtatctccttttctttttctttttggatttttcatagcccacttatttatatctcatcggattaatctacttgtgtggaacagttcaagctgagttttagtgatctagttcaagacaagtccaagggcaattacatcgtcttagcatcatatatacagaaacgcattagtacaaaagccacgaagaggaaaagccgtataatccagcatcagacctccttcatgccgagtattccacctgctcactctttgcatcagccatttccataacctccgcatcagaatccgcaaatgccttgtcaccgaatgcaacagcaatctcctcgagagaacagtgtgctgtctcgacatagtaaaagtgaactagaatggccgaactgagacagaatcctgcaatcactaggtagaaataaccatgaatgccggcgaaagcgtccggagagaccattccaatgatgaagttaaagacccaattgctagtcgtggccagggccatgcctttactccggccccggagtgggaagatctccgcgggcagaagccacggcatcggaccccaggtgaatccgtagaggatattgtaaagcatgacgaaggcatattggccgttcgctttgacttgaacatccacattaatttcggtgaagacgcagacaatggctagtagtacggccatgccgagacctgttttgatttttagctttcactaatccgatgctcgccttcatggcgatatatatgtgggaactgacctccaagaatgagcagaggctttcggccccatcgatcagccaaccaccaggtaacaactgttgcagcggtgtagggaagagcatttgcagcagtgtacagcagggatttgcgattatcaaagccagcggaggcgagggtgctcggaaggtagaaggagatgatgttgattccgttgatctgcgcgaacatctgcactgtgattccaacaatggttcgtttgcgataccgggtgaacatttcctataaagtgcgatccggtgttagtaatgcacgagattgacaagccacacaagtagtaaagggatcgttaccttccaaccggactttccaagattgtgctcatagataaccgcttcttgaatctcgaggaacgtcttctgaacaacctccgcctccttattaccatcagaatgtaaatctgcaattgtttgcaggctctcgtcaatgaacccattcaaagccaaccatcgaggggtctctggtaggaagaatgacatgacaaacaagacgaaagagaacacaatctggatgatgaaaggcccctgccatgagatatggtgtggcagcaagaagttaaacccaaagtccacccagcaagaaatcatatatccagcgatcaaacaactgtactctatacccaccatcaaacctcggcgatgagaaggagcaatttctgtttggatgataggcacagtcatagagaggaaacccacgcccaatccttggaccgtgcggcctccaacgaacgtggcaaaatcaggggcaaatatttgaatgaacgagctgaagaagtagatgaaagcgccgacacggacacacttctttcggccaatcatgtctccaagacgaccggctatgagtgatcctaccgccgctgctgcttgcaaacacgcaacagatatgccggtgatcgcaggatcgaccgcagtggtcgtcccatcagcacctccatagtctttgaagaagcgagttataaaaacttggttgaccagcagcccggacatgatacctatcaaatcagcagctatatcttgacaacatattcgaggacgccataccagagttataaccgaaaagggcatctcccaagcttccaaaggcacatgttgcatacaataaggatttgcctgtcaacgggtaccgggccgtgatcttcttgggtttgagtttcctctctagccagctctgctgctgctcaacttccgcggcgacagcgagggaacgctctctgagagtcgcaacaggtgccggctcggaggattttgtgatggccatgctgaagatgaatcgaccaacgaggacagcgtatcaaaaccactcgtagatttcatcaagagataagggggcaagggctttatttataccccagaccatatccgcgtggaagaggaattttctccagaatgatggggaaatggatcctggtacactaggtacactatggggtcaccatttcgccgggctaccgaagccatgtgtttttcatggccgggatgagacaatacgggaatacgcggctggctgggcatccctcgtgatcggccgtgaaaaattggccctattattgatcatttagacctagatgtagtcaaattcgagtagtctttgttcaatagtccatcatatgaccgatctcgccgtgaatctgtggggaactaaacggtttcgggactctggcggagccctcgtctcggttccggtggcgaatatcacgcggttccggggaggcttggcatatctcgaagattgtgccggcggaagacgacacggttcctgaagttgcgggattggcatcgggaagatgcgggagataatgactaggataggtgtgagagggcgagaatatatagtcaactaaggcctcaacgaatttggatgaaattgagccgtggatggccaccatttgaaccaatttatgcttcctcggtatcccgtatactagtccggctcggggcttgaacaccgatggagacctcgcctggagctgatcgactatccgccggaaaactttcaatacataggatccgttcgcacatgtaacgtagtgggtaaaatctgcagggcatccataatatttaaagcttagtagaatcccagaaagccctgctcaatcaaaccaaagaaatccgcaaaaatgaccgtcacagaagctgcccaggtagttccaacctagtcgcgacccaaacacatcggtttaatgcacctacttactcgaaaattcatctaggctaccaatgaagcctttgtactgcatcccggaggcacatttgctttcgaggaacgcagcgtacccacaatccagtcagaccgagatgtcatagtccgagtcatggcaacaggtctctgtggttcagatgtaagcgaaccggcttcgacttttccattccatttctcgatgcaacgaaactaacaagaatcctcgtcgcacaggtccactactggcaacatggccgaatcgggccatacgtcgttgaaggccccataatcctaggccacgagtcaacaggaatcgtggtagagaccggaagcggtgctcaaggcttctccgttggagatcgagtcgctctcgagcccggcatagcctgcaacacctgcaatcactgtcgcaacggccgctacaacctctgccggggaatgcgcttcgccgcgacacctccatacgacggaaccctcgctacctactaccgcgtgcctgcagaatgctgcttcaaactcccatctcacatctccatgcgcgacggcaccctgatcgagcctcttagcgtagccgtgcacagctgtcaattggcaggctttatgcaggataaatcagtggttatattcggagctggccctgtcgggttgctctgctgtgctgttgcgcgtgccttcggcgcgtcaacggttatagtcgtggacgttgtcccggctcgcctcgcttccgcgatgaaatatggcgctacgcacacataccaaatgagcatggaggcggcggacaagaatgccgcggatttgctggcaactgccggcttgcatgatggtgttgatgttgctctggatgcgactggcgctgagccttgtctgaactgtggtattattgccctcacacagggcggaacgttcgttcaagtcggcttgggaaaacccaacccatcagttccggttggtctgatctgtgacaaagagattgttttcaagggaagcttccggtacgggcctggcgactttaagttggccgttggattgctcaactcgcgccgagtcaatctggatggtctcgtcactaatgaatacgcattcggccaggctgaggacgctttcaaaaatgtcgccggtcggggtggaattaagagtgtgatctatggcccgaatgtcgaccaggaagaggcgaaagcaacggcatagtgcatgcctttgtgactgttatttttagatagaccgccgattaccctccgactccattccacgtcatatcccataaccaatacaacccaccttcaacgctatcctgagtagtgttttcaacgggttcccgagacagaccaggcatgttccaatcgtattctgctggcagctgccatacttcatgtgcctgtatgcctggctcaacaaattcgcggggttgaaggctatctccaccagtaggaattccggtggagcgatctcctggacccaaagctggaaaatatatttgttagcaagttcatcattttagctacctcggatgaatgataaagctcaccatattggacagatgttaagctattgttcaggcgatcagccctgctgaggtccggcagacgttggtctctagcaaggggattgcgagaatcccatgtcgcatctagcggcattcgaagtgtgtcttcaacagaaattaacgacggatctgccaatgtctgtaaaggctggtgacccattacttggcttgttgcggtgacgggagcaagcatggcagccgattcacgacgtaggagcatgataacaacattcttcagcacagccgtgctttgtttcgatagtgcagaccgtcttcccagcagatcttgcagacgaagaatgcgagtaatcgttcgcttcacttcctgcgcggtatcggaaagaggctccgagagagccatcacagccaaaacaatcgcggcattgaataagttgatggcaagaaatgcgcagaggtggctgtcagtggcgagctgcgctaaagccggcaattctgtcacccttgatgttcttgttgcggcattcatccatagatccggagttgtggtctggttattgggaaatccggagtcgggagataaatttgactgggccacagagggatcggtggccggatgatacatgatattatctgttctgcttccctccggtgtttgctcattcacggtgtagagatgatcaacctgccgtgctaacaaaggtcgatgcagtacaatgagaacattgtcgcaagtcagttgtagcgacagagactgcagggcgtacgccctcaagcttggtgtatcatcggggtcgaagtcacgattaaggtccagagccaaatggctcggtaggcaagatcgccatttttggaggttctcggtgacgtgcctgacaagtgcaaaatacgtgtcaccatttagctgtttggacgtcctcagagtacgtgacccgaagacggtcttgagggcaggcgacgcaatcaagtagagctggtttagctcccgctggtaggttgaatagcatatagggctggcctgaccgagggctggagaaacaaaattcgggttctcgaacacatccgctggcatatcaagattgcaatccttgtcgttgatgcccaatggccggccatatgtaattgatgcgaacctgtcccatgtgtaaatcgtccaccacactctttttctttcctcgatattctcgaaatcccctcgtagaaggccccgatgcattcctaaagactgtgccatctttatagtcgctcctaataaagaaaaggagagatttggacggccatgatagacgtgatgcgatcctaggagaatgcaggtctgggccgaggtgaccgaaggttgatccattaattccaccagatttgactcaaccaaccccaataagtccgcactcaatttcttcatgtcatcgctgttgtcggccgggtcagtgcaattcctctgagatcggtaccacgatgccattccaagcatcacggccaataacacgagaaagggtctttgagaaggatatgcagaaccatccgcgatggaatctaggctctttctgaattttggctcgtaaatggcgagagagaaccagtgtacggcatcaaaataatcttccaacagactgtacacgagctccataggaggaaacggccggctcaagatggaagatattggaatgcgttggcccgtcgccgaatttgccatagaaccaccggtgctggcctggtatccaggtatggcggatgtggtttgttcatcaatgttatggctgccaagttgacagattcttcgagcaattcctatggcggattcagcttcgccgcagttgagagacggaggcatattctcccctccagcggggaagtcagcatcatcgcccctagggtgtgcatctattaatctactttgctcggggattctttcaccgcgaccacgatcattctcatccggtgacttttcggtaagagtcaatggagatagatgagatcgatgtcgctcagttagtgggtttcttttggaacccaggcgcctgacatctgatgtaagtaaaggagagtttagaggatctcggtgtacttacttcggcagagtggccctccgtggtcgggtcgttggaagtggtcggcaatcgacgttggccctgatacacaccgagcaaggtcgaacagggtcacactagtccaggttggattcagtatacgtcctgatcaagtgggatcagggtggctctacccgagatttatggcgccgacatctttcgcaggcactccggactctggtcggcagtggcgaccggacataactgcttctatgctcgacagtgtcaacagtgaaacctccagtcatcatgaggttatactgaaggtggcatgtaggcaaaaaataagatttccaaactaaccaaatttgcgcgtgtagggtcacgcgcttgagtttatctcatccgcggatgttccacccgaggtccagggttgtgttccgttcggatataggcacaaaagtaggcaacgtaaaaagtctagatactttgttattaagaagttgtgtaggccatacataactaatcataactatattaaaggattagaaaatagcctcagcaattctcaaaaaaaaaatcaaaaagaagaggtcgtgcccgggatcgaaccgggattgctggtatcagaaaccagagtgatgaccattacactacacaacctgaattgttggaagggcagggctcaaaagcttcacaaagaaaatccttggacaaaagacaaagcttggggtttaatccaaatttagaggattccaggaagcctctaaagtattcctagccgtatatcctagataattttagggtcgggatctattgtcggtattgagggcaaatgcaaagccatttttattgaagcttcatagtgtttaataaggaatatttcctcaacaaattcggttgtgtagtgtaatggtcatcactctggtttctggtaccagcaatcccggttcgatcccgggcacgacctcttctttttgatttttttttttacatctacaaatagctgttgacgggtgagagggtgttgatacaactatgtagccctttggctggtattctctgtcatcttgtctatgatctcttaaacgccaccggtatttcccgaaagaaggtgagactgtttgagtgtgtgtttttggccagtgcaagtatggaaaaggcgtttcccgggtttcgcttacgaatgaatagaaggagatgagaaaacggaaacccatttaaggtgtaagaaacttatgtgaacttctcagattgtcactactgtgtgtttattaaatggtttttttggtatgcgtttggttctcttggatgttttcgaatatccttttggaatatataatcagccgtcaactaagtatggaattgtagaacaaacttaacaataagtttctacaattacatgtaacatacttgatggcttggtacattcatcggtctggtttcccatatataacccctctgatttccatagtaattagacgcttacatgttgaagtaatgttttaacatgtcatccacatattgtgtagaatgactggataggggatgtatgtattagatcagaatagcgtttactgggaatttgtctttccgatacacatatgagatgtcttttagtatcatcataaaataactcagtattctatctgcgcgctctatcgttaactacgaagggcatgtaagcgtcctgcgattcttacactattgccataagctccatcatgatagtgcttctcaacttcactattctaacagcccgcatctcactgcgtcaaaaacttattaggtacataacgcggcatcgaatcctcccacatgctatcagtgaggaccgttttgttcgagccatcagcatccataaccataatctggccgtaaggctggaaggtatcatcgtaagtcgcagcttcagcctggaatccccacattccagtggaccacataatgcggccatcagcagtccagacagcgtgggcatcgttagcaaacgatgtagtgagcacagtcaaatctgtcccattaggacgaataatgcacacttcataatttgagaactcgttcttcgacaggtcggtcatattgcgcgtaaacagaacccactcgccggacggcgagaagaatggcagattatcacgctctgtcgtcagagtggtggtctcgttagagtttaggtctagcaaacgcaggccgaactcaggcaggtattcgcggtacacgatcttctttccgtcgggcgagaagctggggaatcccttattggaggagttgccgaaggtgagttgctcatagctcgatccatcggacttggcccggaagatccagccgggctcatcggcgcggctttggaaccaccatcctagaccgaaggtgatccattcactatcagacgaccaggatggctggaaggacccaccttcaccgctggaaacggtggcttcgtcaagcgcgccggtttcgtaggtatcaaacgccaaggtgaatttggtgtcgcccgggggcattacggctatagaagaattgccggggctacccgtttgcttggaggtgaaggtcaattgcccatcaagagagagatcggggaagacgtccatgaagtggtaatcccactccgggtcccaggaccacagctccttttgcaatggccggatctcccagccagtcttctcgtagaccacatgtttgccgtcagcagaccaggcaggtgagcgcatacctccgagaatcttctttgcactggaagtgtagtgaataccgccgtcgtctccgcctttgagcaagtatccgatgtcagtgttcgagacatactgcgggaaaatcttgacaccggaggtattggtatgttggacaaaatcggttcctgtttcgaagtccacagaaacgatttggttggttgtggagttgacggtgaacgacgaacgcgcatcccaagttgtttgcaccgtcatctcgtagaatacaactcgcttgccatcgggggagaatctcggcgacccgtaagtgtaattcgccttgctgtacacctcgcggaagccagttcccttgggggtgatggcatagatagccagctcttgagtatgctcccagccagtgccattgtcatgaccggtccacgcggtgtttcgatcagaggaaaaaacgatccattctccatcaggcgaccaggcaggcgcaaagaatccgcttggcgactcaggcttgcccgtcacaccagtctggttggtgaggttgcgggtaacgccgatcccgaggttcttgagccaaatgttggaggtgtagacgccggccgtggaggcgtaggcagcgtacttgccattgggagatataactgccgcatcttcgaccgagggtgtggttgcgattggtgtcagaccgctgccgttcacgttgaccatatagatatcggagttgccatcgccgttacgttcagtggtgaagacgacgtgcttaccgtctggatggaaggaggcatggtattcgtagttggaggcattgcccagcaaggagcgttcatttgtgccatctgcattggcaatgtacagtttggatgaggagggattgatacggttcatcaacatgatgcctttctttcccggcacagtacgagggagcacggcatcagagcgaggcttgaggcttgcatctgctagatgcgcgtaggggcaggcggcctggcacagtgaagggcccaatagggccagaagggagaaaaagaacatgatgttctgcaccggatcgatgcttggaattccgcgagaatccagtatgttgcccagccgatcattctttatataacagccatttttgtagaatatatatagaaggccaattaaaatccaatccgggttcttcggtccgaatgtctgaattgaagatttgctgattggatatggataaactgatgacgatcgtcatgttaacggagggccacaatacggagtaactaggcaccatgtgtgtgatcgacacaaggtattgccttgaaaaagaccgagattgcaattgtttcaagaaaagcattgaagatcaacaccatgcaaggaagataagcccgagatactgatgctcggagatagccgattgagcgaatttacttagggctagacatgtaggtacgtacggagtactccgccggacattgtaaaggagctcaaacaggacgagaatgcatgagtgctgaagataagcactattattcgattgactacggagtataaattcatagagacgaatccactgaagtcgggagtcgggaccgaggcatgaagtgttttatcatgcatccttatcatcacgtgctgtcgtgtcagggacgcgttggacaactttattttcaacgatcaaagccaccagctctgacaactagatcccgatgagtttagatcgtgtcattcaggattccgacgaggacgaactctcggagggggatgacctttccacctccgccaaccccgtccacccatccgagcccgcattgcagcaggaatatcaacatgcccccgccaaaaatacgatccacaatgcagtgtatgaacatggtcctgctcctgatgaaagcataatcccggagttgagcgtcgactttgatgagttcctccaatcccaagagaagggtcagtcaatgttatcttcgtcgcagcaacggcgggaggacaaatggataccctcaactgagggtggaagtgggtcggttggtacgatgtgacagcatagtctgaagtacaaataataagaagtgatctatatactgataccgaagatgatctaggcgccatgatgacggagatcggaatcgcgcagagaagacttatggacgacgacccttcaagtgcaagcctcccttttacggccgcaccgtactcgatagaatcatttcagtccgcgccatttcctaccgtaccaggttaccacccgtatcagatatatcaaccggagaatggcagcttcacatataatccagcacccattggcgcctatgtcgatgccgcctatgtcgatgcaaatcagactttgttgcccaccagacagggtacctatgacttgaccccgcctgacaccactaatacaatggcctcgcctccgaaagtcgttccttaccacgctaccgagccttttatggaagaagagaaccctcagtcgaacccaccccagaaagcctcacaggcgaagtctcagcagactggtcccttttccccccatgacactgagcctctctcctcaattgcatcgctgaatcgcatggatgcaaatattaccactgctggaaccagtcttatttccccgcagcaatcccaatcaagcacgcatgacgagctcgctctccctgccgtcttaccaaatatgccagatgtcgggctgaccggtgtaacgaagaagcggggacgacctaagaaacaaactgggctaaataatgatgaagacgatgagctagccaactctcgagaccacgagttcaaacaccctggcgcaaatggtgcgattgacccctccgatagcgaagagaccacggaagataataccccggcctcgagtggagtctccgatgagactgacgaagaaaacttagaaacagcccctaagcctgcaaaatcaggaccaaaggagccgagaaagaagaaagctaaaaaaggcaaggcgacacctgcccctgatgccgatgacgacgtcatatgggtagacacgaagcctctcagtatggaaccttcaacaggaaatgccaccccgcaggcagaaaccccaaaggccccgagacaggatttagactccaatgttttggactcatacccccaggcaccgattcccacagcagaagagaagacacaaaacgtgcagaaagccgagaaaccagcacccaaaaaacgcggacgcaagcgaaagcagacaaccgaacaagcggaaacaccatcagagtccgcagatacacccgagccaaacaagccgccctctggagcccagactcctgcgccgaatgtgtccgtcgttgtcgataatagtcccaaacccatgccgatagctaatactgataacaacgatacatctgctactcaaagcaaggaccagaaccccagtctacttcccgatcctgaacctctccctgaaactacgattgatacccctcagcctcagactccttcgaagcgcgatacttcatctgtcaatacaccccagaacggaggaaagggcccggataagcacagtcccatctcggcgcggaatggggtgccttaccgcgtgggattgagtaagagggcgaggattgcgccgttgcttaagatggtgcggaaatagggagagtgatctgcttccttgtgatggtcatcttcaagctgtggttaggtcttggcttttttttttcattggtttggtctgttgctgctattattctgctatcattatacccctcgagagaatgttctcggcctgctttctttgttacttctttttgttttctgttggtattggtatctgcatattggtatctgcatatcttccatagttgcatgtctacatatatttcttcatttacatggaataggtgaaaggtaggataatatcctgaccaggtgtgagctgcgacgatttgtcttgagatcttctctagtctcaatatcgaaaaaattacatctatttggaggagcagagttcagcttatatgaaagcctatcattactcgagcaaaagacgaactttgtattgcaattctgatacctcttgatgattcctattccatgagctagctaaccctgccgtgtctgccgataagttcaaacgaatggtttggccacaatgaagccacagcatgtaagtataactataatctcgacaatgtaaaacccggccaaacaatcatggcaatccaatccaaagatcaaaatgattcatcacatccacatcgcaacgatcaaagcaaggaacaacgatgttgcagccgcggtgccaatggttcggaaatcagaatcagcttccgacttgtgacccttggtttggactttcgggtcccaggcatcgccattgtaaggagcctcaacggaacaatatccggcatccttttgacagccgcttccacaatgactggtggtgttgccacaagagctagtactaccacagcaaaagccataggtagatccaaggcaagtgtagttggaaccacaggacccgtcccaagagatcggcttgttgggatctgccgaagcagtattcttgggcttcttcttctgagtgggcatccggctatccttgcggtaccagagtggcctgggatcacggagacagtcgccgacggtaatggcacgatagccttgccgcttgatgcccttgagcatgtgctctgtgaggttgtggacggtctgttcatgggcgtcatgggcaatgacaagccatgatttggtgcgtgggtcgctgttcaaaagctggtgatcaaagatatccttagaccgttgaatcagatctggactgtcatttttatagtcatccgtgtcaatgtcatacaaaatgatgtggtatccaagctcgcccagctcatttccgcactctgtgtcagggctgcagctggaataaggcggccgcatgtaagtggggaaagatccgagaatgttgcgcagcgcagcttcgttcttctcaatttgctcattgcgttgcgaaggagtgatcttactgaggtcctcatgcgaccatgtatgactggcaatctggtggccactcgagtgcatgcgttcaatcaatgaagcccatggcaaggtgaggtcatcgatagagccctttccgttgttgatcccagtgatgaagaatgtcgccttcgcatcgtatttgtcaagcaaatcgagcagatcgccagtgtaacgtgtcgggccatcgtcgaaggtcaatgcaacagttccggggatagcgcatgaacgaatctcgcgagggccgtacggaacttggccgacgtgaggacgggggatttccttggttgggggtccagaaggcgatcggtgagcgtcacatttaccgtagtcaagcttgcagtctggagagcgacagtgcgccttcgacgtgccgcagaaacctatcgtagaatgacatcagtaaggtgctcaagctaacaggattttgagaacatacctgcacccgagcagcatgtaccgaccggacatttgccgatcttggggccacagcgatagtccaaattgttgggggcatcacgagtgtccaaatgagactcggtttctggttgaggttgttcaattgcaaccgtatgcacaggaccgacatgcaatttagcaaatacacacgttgccaaagtggcgacccagatgggttgaatacgcatcttgagaatggtatatagggttaatctatgttcaactgggtatgtgagatgcaatgggttgggatgatagcaacaggtgattcggagtgagaggagaagagagaagaggccagcaggatgggggaaaagcaatggagctaatttctacaagaggaaggaggacaaagaaggaaagagcgaagcttcgaggcatttttctacttaaatcacaaaacgcaggagcaagtatcgtggcaagagctcctaaccttgacaaagaggtgtagaagtagagattgacggcgcttgtattcaatatgaacgtgggtatcgtgaaatccatagccgtctggggcattggaaggttgatctgggagcccagtacattttccggatttagcaaccaaagcctagtgggtgcgatcaatatggtcatgatgtgactacatatagccaattaagatcagacgcagcacatcgggctcctgtagcagcccttagcatcatgcgtaagggtctaggcttcagtgtcggtcagacatctatcatagggcaatagttatgacaaatcaatttgcccgggtaatgttatcttctccgactgccgagaagacaaaaggaacaagggtatccaggtgtgggccaaacttcccaggtgcggtttttgcaatggcgccaattgcagcgatcaagtgccgacgctgcaccacagaaatctcggaagacaatgttttcgtcagatcggacacaaattcgttgagctggttgtcggagaagtagagcacaagcgccgagatggctgtcagggcgcgtttagtgacaacagttccagccgtgtcgttttggatgatggccatgacggatgcctggagggaagcaagctccgaatcttggagcagaggcccaaagcaggtcacgaccttgatgagcacatcgatggcatcactactgaagccccgtgatggatccttctccatcatgcctctcaccactgagctccgccgtcctgtgattgagagagtcggtccagtcaaacggggaaccaagacctccgaaactgctgtgtatgcaataatcgaattttgagatggaggctggcccgactggggacgagggagcgtatcgacgatgacgcgaagagcagtgttggggaccgatgtgtctatcgtctgggaggcagtcaaattggccaactgctcgagaagaggtgtaagggattcgagtggtaagcgaactgcgagaggaccgagactgggttcgagttagatatcagcaggatcggagggcaatagagctcgaataccatttgagggcctggttctgcacgtcgccgtgttgatcatccaaggccttgagcagacctcctgcgagttttgttgcagtaccacggtcgtgggagaggaataaagaatttgggttggtcaggattccatatagatcgttcaaggacatgtatctcaagtccgcatcggggtcatcaagcttcgctagcagggcgaaaattgtctgctgggtaacctggcggtccgccatattgacgaagctatgactgttatcggtaaatgaggttgagagaaagcctagccaaggtgacgagtgaagcagtggatagtgaaagcaccggggagagcttgcggtagcctttgatagacgccgcaacgtgggggtgtttccgcctaaggtgtcattattatggcctgaggcatgattgcaactcagtgacaacctccgaaaatgtcaactttgaacataaaatatcggttagatcttcgaatatggcccctacatagtcattttattaaggaaggtgacattgaatacttggatttctccaattatcggatctgatactcagtcgagatgcacgtgatgacgaacaccgtccaagctccaagaatggtcgttctattgataccccgtgaactataccgaggtaataaaagttgtacctgcaaggtcctctgaaagtaccagctaccgtctaaaaccaccaaaaccaacgtattcgtcaagtaccaagtacctggcccaaccatgccaattacatcacgacgcacagaccatctcggaaacaactaggatgcggtcttacgacaccgagaggtcgacttgcgaaaaccgggaagctttggtgttctagtgctgacttggcgttgtgctttgtgctctttgtgctccaatctactttgtacctaaacaatccattttcaacctatcaccctttccacgttctccatcaattctactctgtttgtacccaggttgctactacacaatggtctttgcgcgccgttcaatcttccgcgctgcgactgcagctcagtccttccgtgtcggctctgttagtcgccggtctgcccagctccttggtcgacgattcaagtatactagcaacagctatgagccagggccttcatccagtaacttgccttggtaagttatgttcttccaagaaatcttattcggtcttctaactacttctgattgtaggttggtggcctctactgctgtgactgttccaatgatctatttcctctggccttctggctcgaagggacatcacgacactcacggggacgaacataaagaggaacacacggaggatcacggcgaggtagaggaagcttccgaggaaaaacctaccgaaggatcctctgagccggcgcccaagaaggaggaaaagacggacgccgaggagaaaggcgaagagaaggcggataaaaatgaagagcccgaagaaaagaaggaagaacccaaggatgagaagagcgagtccaaggaggaagacaaggaggagaaaaagcccgaggaggagaaaaaggaggagaagcccaatgatgatgactctaagaaggaaaataaggacgaaaagaaagacgaatccaaggaggacgagcctaagcaggatgagtccgaggatgctggaaagggcgagaacaatgatggcgaggcaaagaactgaagacgccttactcccttgagcggctgtagagccaagcctgtgtatgatatttcaacatgttaatgttcgattctttgtcccatactattcgtgtacctgtacctctactatatatgagatatagataccagtcatgttagcgtgctgaagaacgatagttcattggtctattctgctagtccggtctaatcttagtagtcaatagttggccgcttatacgacctctatacttgatgatatagggttggataatcccaatatagattgtttcaagatgatatcatgaacattataattgcaattatattacgatgcctttttaatacatttagagatatctttctaggtgccttctaggataatctgtcgtaaaccagaatatgtcgtctgccgtactcttgttgctcttttgaaatgtcaataataagcgcacgtcttaaaacacaaaggaagaagaagaaatatcatcatattgatctaaaagatgaaccaaagaaaaaatagggaagcaaaccaccacgtgacacctaaagcccttccctagcagtgtttgacaatcgctcacagtatacttaggatcgtgatatcacatcttgattcttaagcttttctaaatttactagtattttgtaagttcacttagacgttacctagaagttacttagacgttacttagatgtggctaagacgttacctaggcgttacttaggcgttagccgcgctacttagaagttacttagacgttactaaggcgttactaggtaagagaaataaaagtattttgtcaaaaaatctccatgaaagacttttagttgggccgtggtagccctgagtgtaccacctagcttcaggacaccttagcaagggccgggtattcaataaaacccacggcgttcaaagaaatgcctcaatgagagtccatcgggccttcgcataacatccacccagctcaaatcctcctttccttcctcccgagtctcatcaatgagattccaaatgtcctggacggcagtccactgtgccgtgacatttggaaggtcatattgctgcaacgaacgccacaaggatgcccacaactggcagtccttgctgttgcaggctcccacaaaagcagggaaggtgacgggtggatctctgtgcatcacctcgagtgccaccagtgccttgagctcttcggcatggagcaggcacatcaagatggcatccacagggatggaagtgtcgtccacgaagatgtggttgattcgattgtggaagtaaaggcacgccgagagataccaagccacttcgaggttgttggagattatttgttgtaccttcatgccgggaccaaggaaaattgggatgttatcatcaggtcgaaaggtttgtagatgggaagtcaaacaatttatgtcttcaatgaggtgctctggtaagatatgaccgtccatgttatgttcttcgattgtttctgccaagtcttcgattttcttgatggctagctcggtaaagtgtgtgatataatttagcacaccaaatggtaagcggagtggcatagtgactacttggagtagtggtcacaggataaacaaggtggaaatgatagattgaatggtatgtcaaatgtgataggcaattggtcgtgactgtggtactcagcaaagaagggaagatgagagtcaacgaggaagggaagaatactcggagaaatcttctgatataaacacaaattgtagctactattcgtatattgacaagacgctattggcattgatgcctagacgatgcgatgtgattaacaaggcaatattaccttcgtatatgcaggcatcgaagtaggcagttgatatagtttgtagaaggtacaaaggagaataggaaagaatgagcttgttaacgacaatagtagcttattgccaatgtattttgatgcagtgaatatggaatctatatgcattatattcttcactgaagaaccagggaactggtaaatatgcagtttgtgacgagctgtctataagtgaataagtttggttatactctcgattcattgctagaaattctatcatccgaagatcttggtaagacttcgtataagatcctagtataagaccaaagcaatagcacctgaggtccgaagaagacgatataagcgagaaacgtggaagctctatctcgttggaaacaagaacccagttcagtcgtgtttctctcgcactaccttggagcttcaacatgaagttcgactccctcgaaacaccgagaaagggttgatatccgcttttcgacatcgcgctggttgtttcatcactgtgcttggtattgtctcatgccggattcatccaggccataaaggtaataatcccctctaccttggatgatgttcattactcatgatatccggcttgcgaatgttggttgtggagaaggaaaaaatcaagtctatctgatatcatatcgctgggagtattcttttcaaaaagaaaacaggaccaggcttaattgcttacaataaatatggttggttgtaagtccctttgtttcatatttgcttcataaatgacatccatggactcaaaaagtatgttaaaaaaacacaaatgatgtacatgaatgacaatagaacatcaagagacagaaaatgtagtaaaaattatttaattcatatgctcgtcaaaacaagtgccggcgcccgctcttctagagggctatctcacaggcactgccaatgtaccgggctcagacccagctccaacaaatacataacagcatatcaacatccagaggatcagctggagacacacttgatccaatgcataactataaaactgtgaaagtccccaactttgatgtcgggtaattgtttgaatgctgatcgattaaatgataatcgatcaaacttcagggaaagtgctagacttatgcctttctgctgcgagtccgaggaccacgctgttcagtgacaggctcgccgttgagcagaacctgaggagcgtggttctccttgccagtctggtctgcgccactggcaattgccttggtcgcattgacagactctagcgcttcctcttcctcttcgtcctcgctacgctcgtcttttgcgacattggtgaagatgtagtttgacaagatgcgcaggatcaggaacagccagaacaggttgacagcctgcaaactggcgagcagcgaaaaggtgatgtactgactgatccagcacttgtactgctgtgtctcccagtttagctcgaagggtccaacagtgcggaactcggtcagaacagcccagaggatcttcaggttcagcacatgacgcaggtaaatccaccatccaacgaacatggcaaagtatggcgcggtgatatacgcatccagataattgagcgtcttggaggtggccaaaaagaagtcggagatatcgtgcgtgatatacaccgccaagcccatgtacgtgaagtggaagcggtagctcagcgcaataagcgcaagcgtgataatatggtgaccaacaagctccttgaagtccttgcggggcttctccaactgcagcagcaatacaatcgcctgctgagcccaataactcgcctcgagcaggtagtacgccttgaacagaccctcgtgctcgcggtgcgggaagccctcaaacatcgccgtcgtattgaagtaccagacagtcgagcgcttcatcacgtacagaccaaacggcccgaatacaccaaagtacacggccgtatacgcttgctccatgaaccgagccgttttccccttcccacggataccacaccacaccgcaaaggggcggatcatctgctgcataataaattcgcgcgtgaacgacagcacgatcgtgtagaacgccacgaacgcaatatcctttttgcctttgccatacatgatgggtccaccgggagtcttggggggctgcgggtaggacaagaagatcgcgctgtgcatcgggttcgaggttgtggggttaagcgcgtacaacccaagcaggaacagcatcacgataagcggcaggagccaggtgtatcgcagacaggtatccgcgaagcggtggaggagggagcgactgcgacgtcgtttggtctgcgccttgctggcctgtttgtgtgcgacatcgaattgctggtgggattacgggttagtgaggggatttgggtgggcgggcaatgactttcaatacgtaccttcagaaatggcgatgatggctcgataggactcacttcgttcatcgtggacatcgctggcgcactggtgtcaccccgaatgtccacgcccaaggctgatgttcgccgggggcgaaccatggcgaataggaaactcgagcttcctacccttttggactcggagggttcgagctcacgtgctccaatggaaagaggtggatgaagggaatgagaagagagactcgagactcataaccaggacgatcgggtgaagaagattgtgaaaggtgactatccattttttttttccagggggtgaagaactccacccccgttgaccagacagcttcgcagctccgatcggaaagtcttggcatcttcatttcctttgatgcgcctttttgggatgcagcaactagcttctcggaaacccctatatacatcccgggctggtttggaattcgcctaggactgccaatcaaatggccaatacttgcgagactcccacggaacttgcgagacgaccgcggacagcgacatatcctatttgggaccccgacgtgtttacgatcccacagtcccgaatacgagcatattgaagctggataaaaatgttgggattcgttgatatatgcacggattgtggatttatgcagttgttgaattgtataacatgacatcatatcgacatgaacatgtctaacccaaaagagaagcaaaacaataatacagcggagccatctaacaacctcgtctatacacgctcaacttctatgcgtcgacaacctcagcgtgagtggcagcgcgcttgtcagcaccagccagtttttcaccaaggatctcaatatcacccgactcggcagccatagtgcgcttggtatcgtgggtagtcttccaggccggggtaccgatataagggataccgttgggatcctcaaagatctgctcgatttcctctagagtcttaccagaagtctcagggaacaagaagaagacgtgaatggtcatggcgaacaagaaaacaccgaaaatgatgtacgtctgccagcggatcgtggcaaaagcagtgggcacgaacagaccaagcgccgtgttgaacgcccagttgaacgaggtagccaaagcaacggctttaccacgcacacgtagagggtacagctctgaagggtacacccacgatacgggaccccaggtcggagcgtacgaagccacgaacaggtatgtgcaggcaattagtcccttggcaggggcgccactcagaagcattgatgcctccgccacgccgtcaataccgccggggacaatcacgccgtacttggccatgatacccgcgttggcaaacatccagatcatcatgaaaacagcgccgatcaggagagtgggacgacggccccagcggtcaacccagatcaaggcgggcatggtcatgaccacgttgatgatgtactggatggaggaagcgaggagggtggcatcacccttgtacccggccatggtgaaaacatacgtgatgtagtacatcatgacgttcataccggtcagctgggaccagatttgcgtccagattccagtcatggtgcggtggatcatcctgggctcgaacaactcgaggtagctaacgtccttgttctcgcgctcgaactcgcaaatgtcgcggatctcttgcatctcggctagaacgaaggggctgttcatgtcgcccttgccgtggaccagggtcagcaccgcctgacactcgtcccagcggtccttgcgggccaaccaacgaggggactcgggcaagaccatcattccgaagaagaggagaacagcgggaactgcctgtacaccccatgggatacggaagacggactcgctgtagttgtgggaggtggagctgttgccatgtccgatgaatgagcaaccgaaggagatactgtggaacaagagtcagctactgagtcacttttcgaatctcaaaccaggtgttaccacatactagtacatgatcaggataccccaggtgatggcccactgctgagagccgacgagacgaccacgcttggagggaggagaaagctccgagatatagacaggaacctgggcggactcaattccgacgctgagaccgttgatgactcgtccggcaatgagcatacccatgttctgggaagcgcatacgatgacggagccgataaccctaacaggatgttaaccacaacagctcaatggcaactccaccctaaccatgaccacttaccaaagaacacaaccaaccatgatagcatacttgcgaccaagacgatccgaaatgaaaccagagataagagcaccgagccaagagccaccgggcatggcagcggtaacaccaccttgagccagggtgctaagaccactacatacatcgtcgtcgttgaatggagggccccgaggcccatgattgaaataacacttataagccggcgtcccgataatggccgacatggacgagatatcgaaaccgaacagtgcaccgccaatgacggacaccgccgtgatggcgtagagattccccacgacaaacatggtgactgttagacccaagccaggggagaatgatggcaaaagaagagagaaagtacaagaaaccgaaaaaggatgaggaaaaacctccctgcttaaatagatcgcatgccggcaaaatgccctacagtaagaaatacatgactagtcaaatccacccgcatataggcattgttttcgttctgttttcttccagcatccccactccctatcccgtgtatggatcgtccacggagagggattattgtaaaacatgtgatcatctgtagataataacaataataaaaagggagagttacaacaagactatgccaagactccgcttgcaaccccagctaccaaaacgaactttaattggcggaagccggattatgcttatccacccgctccatgatgattggtggactaccccggcaaagactgggatccggggaatcgggccacgagctcacaaaattcctaagccgaagaaggccaagcgcggtaattgagaagttccccgaatccggaagccgtgttcgggcgagaaaagagtcggctgattccccttggacggcagtggcgtttctgggcagtacttaattattactagaaaataaaaataaagacactcttctggaaatgaggttctttaggaagtgtggattcattcaaaacagggtgtacgattttccgatatccccagacccaacccgcatttccctgtcaagaaacaggtcaacgcaacacgtaccaggtaattttactgtattatcttcgcaatttagccggagtgcccacatagctacgtaagaaacgaatgagaagaacatcacttcaaccggtgacgctcaccatcttaagtccggggccccgtctacggccatctttccagaatgggacagtacgcggcttctcgttaacttcagtggctgccgctcgccgaggtggagtcggcttgaactcggcctgcggtggtttttttccttttctggactgatgttggcaattgttgtgcctagttcgcccgctgcgaagtttgattgtgttcggggcttcggactacctggtattgtcacttgctattgggatggagtggaatatgaatgcccacgttgttacgtagatgatcatctagatcctcaaatccattcgtatatcttatgtgatgttccccgcgtggaaagatgcggagggctgggggaatccgaaatcctaattgcgctcaccaagactagcgtggatgatctctcatatgttctggcttttgctcttattttcaagccactgacatcaatggtgcaggccgttgcctttcttcccccttgatattgcacgggccatggtaatctagttaaagtctcatccaagaacggccatgtccaacgtacgctagatatattgactggcaccacaccttttgaacttgccagaatgacttctaccatcaggtccgcgccagagttggtgatatagcatgctacttcacctgaaatcgagtctcgttgagggtaagaacaacatcgcattggaaatacataaagataactgcttgtggtagatcatttgacaaaatacaaaaccatttctggaaagagtttccccgctctcaacacccgacaattaatatacatcactcgggacctcattatagacacgaacccgacttcgatcaacatcaccagctcctatacagaggaacacgcggctctcaacctcgttagacgttgcgatcagagagcacgctgatccactttcaccccggtagaacttcaattgttctccgggttctgaggatcatatttccaacggcggtggttctccgaaacccaccacttggccacatgggccgcctcgctgagccacttcacagcctcgggtccatgctgcttccgcacggcgtcgaccaagaacaggagttggtgatcttcctggggtttgagctcgaatgggtcggcgacgacatcggtgaatcgccacttagcttcgggcttgaggggcacgatcagacggtacggctgtgcggccgctcgcatggtgaaccacgttccaccagggttcattgtggagaaatgccattcttgcttgccattgtgctcggggatgagtgcgcgtatcatcgactggccctcgtacatcggaagtaggtctttgatgatcttattagactgcttatcaatagaggaggtttcgacgagaagatcgagaatcgtggggagaatttgggtagagaggacagcagttttgacttcgatctggggcagcttagggtgagagaagaatagcggcacgtggaaattgccgacgtgaggggaatgccaggcggtgataccgccgtcatttggaagtgataggccgctaaatcaagtcagaggctgaatggactgcgagttataggtagaacttactggtcaccagtcatcactagaagggtctcatcggcaatgccggcatcatcaagaagcttcaggatctcggcgacccactcatcctggtaggctatagtattgaggtatcggttcaacctctcattctgttcagtcgacacatcccccagcatctccttataatcaccagggatataatacggagtatgtgtattatgtgttaaatggctgagaaagaggcgggtgttgttcttcttggcatcgtcgatgacatcccggagataatttttcaatagcttatcctcatggccatgttcctcttcctctgctgtttcttctgggatatatttacgaccacctgcgtcgattgttcgctttgccatgatatccttgtaccctagagcaggatgaagcatataatgcttatcccagtcgtcagggtgtgactgcatccacatagtatgccacggccaagaagtccagtcatctgcctcgccagtggtgtttggctggtggtttatcgcatcgagtatgtgcggcaagcaaggctggtaaatatcgtgcaggtactcgaggttggcctcaacagccatgggattcactccgcacacagtgcccgtaatactctttaaagtataggtcccggaagtgtaagcgttgcttgcactgatgccaccatacggcttcggaagatcatccccatccttatggaacccggtcccaaacccggtcaagcgctcggcggtaggggtgagcttagtgagcctctcctggacgtccttggggatgccgtctgggtaagattcattgacgtgcttcatgatgtaagagtttgagcggaagggccacacatcctgtcgagtgctctctagcttaatgagaatgacatgtttaatcttcacacttccgttgtggagaagttcacgtataggctccaaaatatcgttctggaggtttggcgtgtgtagaggatccttcaacggattgtagtgttcatacacatagtcggccttgttgtgtttattgatgcggaagggagaccaatccgggaagccatctgacgaattgtatgaaggtaaccagtcaaatgtggggaaggagtccagagcagtgtggccctccagccagctgaaatcggccggtaacaaggtgacattttcataggtggcatttccattagcaggaattttaggggcgctttctggaacacttgctgggactttttctggagcctttcctgctggggtactttctggggtattttctggggcacttgtaggaggggcaattgcaggaggggcacttccattcgctggcgttggagtttcatgagcgggcgaatatctgtggctgctgaacggcgcaagagacagggagccagagagatagccgtagtccgcaccgcgtggacgaatgcaactgaggagaactaggattaagccgcacgatatgacgatcacgcgcttcagcaacgaccgcgtcggcttctgctcgggttgacgaggtgcatccaattgtgatacggagtcgctgtcgttgtgaccctcatcatagtcatcgatttcaatctgctgataggtctctggatcggacaatggctttcgtggaagacaccggcggaaagggaatagcaaaaacgaaccccaaatctccaggaaagtttcggtggcttggaagagatacggcgtagcgaagtacgcaacgatcataatcaacgtgtcgacgaagataccgacagtcaacatggacaggacagtctgggtagccgtattgggattttcctcctgggaactttccgacttcccccagtgaatctccgcacctgtatgtacatagaaggagatgttggcggaagttacggaggagatatatagactgagatgcgattagcaattgaatgttgcttacgagtcccggacgacagcttacctgaataaaagagttacaattgcagctacgttctgccaaacccgcgattcaaacgaccgggtcaggtagcacgcgaccagaatgagcaggatgtccaccaggaagaaggtggggccccacggaatgagtgatggaaccgcgagcgacgtgagatggacgcagagatggaagcattttgacaggatgagggagatgaaagtaattgagaagaaatatgtgcgagacgcgtccaggtagagctggggggatctggccactttgagggcgaagatggccgaatcctcgagttgccgacggagctgggagagatctccgggacgattccatgaagatttcatgccagcaacagcaccctctgaagggaagacaggctagaaattgaggacggatacataagccgacaaggaagagagagagacaagttaaaaaaaaactggacactgaaaatccaggggtccaaccatagggcggggcacgggttcatgcactttacggagcaacgcccgggctcttcctgacggttcttggcgcaaatgtgaccacgtgcggaattaccgggataggcaagggggagagcaaacagtgcaaatagaacaaagtcagcaaacactatcgactgcacttgtaatctcgacctcattttcaactgggaaatgtcctaggtctaattaagttacatgcaactattgttgattggtggtgaggagattacatgtcttggtcttatttcgcttagcagggtctagacagaatagatgctccgtacaatcgaacacgtatgttagttgtaggggccaaagcgaatggcacgcttactgtctctggctaattaaggggtgagaactaagacagaaaaggaaagccgaaatctgacaggcttacggtacaacatatgtgacatttctgttgtatgtcgccacttctctatggttgtaatctaggggttccttccaaagttgggatcatccggacgaaccttcgaagctctaactacatgcagttaagctgtttcaaaccaggttatgtcagtccaaatgaggcgagctgattggcaaccccctctttcagccttattgggccgatcgacattgaactatgcttggcacacatagaaccggggaatcaacaaaaaagccgattcaatatatcttccatcaagccatcttacagagatgtggatcgctcaattgttaactggatttggcggatgcttatgactacggtatttctgtggaaatatatatgtacactcatacccgcccaagattgagtgacactctatatatagttctagacatcacgatgacatcactagaataccaccagaaggaggaacagtcggtgagttgtattgcactcgttgacgtatcttagatctcttgcctatgatacactaaaccgaaggtcacagatgatggtgtactcgctggtacaatgccctaaacgagcgggtcaactccgctcagcgaaaccagggtccaggacccaaccgagattgcgctttcatgcatatatgtatctccctatagtagcgagaaagagaagtcagccgtcacattggaaggcccttttctgtctgatccagacagctagctgcacgtggtacttgctgatatgatccatatgtgatcgaccttcattatcttctttgcctgctgaaatcgtattgagcaatctccactacgatttcaggcttcctgtatttacgagttgattggcttaaatagacttgagtcattagtgaaggacgtgaaggacatgtcgatgagctcttcaggtacaggccaggtcgcttttccctactttttcggccaagttgtgatatcatgttaacaagactacctaggtaggtacatatgaatgtatgtatgcattcatctagatcatcgcaggaagagtatcgcatttgcatcatcatcagagtatcccccatcgacgttagagacatcaactgcccttcccctacctagaccataggtcccgtggctgcacagtacaaagtccgaccgcttctcttcttgaaagcgtcctttctctccacttctgaaacttaggaacattaaagttcggataccgatcgtacatctcattggggacctctgccaattgatccgcaagatcaaaagcagtctccaaccgtccattcagaagcagggtgatggtaccaatgctctcatatagtgacccataatcttcaactccgtagcccactttagttataaatgccaaccaaagtctcattgcagacaaaggccactgtggacgtgttttgtacttcagaacctcatccatctgttcatcgtcccacctggggttgccacaacgattggcctcccaatcttcataactcatgtgaccagggggaaatgatagttccgtctccgctgagtgaaagtcgaggacgagggtttcagcgatgattccacggtcatctttcctacccactggtccatatgtcaagaatcggtccaagtagcggtaaaaacagtgattgagagagaaggtagcgctttcagaacaaagcgcatctttactggtgacgatgcgtccaaagaagcgcatgtctatgtgcagcgtagagagacgggtcgtaagccgtgggactgaaatccaggttgaaaacatatacatttcatttagaaccgaaaggtcaagaatgtaggtggtttccttcattcgattgaggacctattgggtttccaccgaaacttgacgatttgtcaggagcagagagagacagttcgaggggagatccatcaaggaaggcatgattgttgatcgggcctcaagatgtttgaagaagttggcaagtactgagtttggaagctgaatgggtgctatttatgtcattatataagcctttgtctaggtaacctttgtttgccagtcgctttcaggcaacggggcactttaggaaggcacgtgggttggaggtataaaagggcctccttccccccaactcttcttcttctcttcttctctcctccacacctctctcaaccaccatctctccgtagccccatgagacagcgtcggcagagggtgccgtagcacatgctgcttcacctaccacagggaccatgacattaccatatgtatgaggtccatgtaggtctgcatnnnnnnnnnnnnnnnnnnnnnnnnnnnnnnnnnnnnnnnnnnnnnnnnnnnnnnnnnnnnnnnnnnnnnnnnnnnnnnnnnnnnnnnnnnnnnnnnnnnnnnnnnnnnnnnnnnnnnnnnnnnnnnnnnnnnnnnnnnnnnnnnnnnnnnnnnnnnnnnnnnnnnnnnnnnnnnnnnnnnnnnnnnnnnnnnnnnnnnnnnnnnnnnnnnnnnnnnnnnnnnnnnnnnnnnnnnnnnnnnnnnnnnnnnnnnnnnnnnnnnnnnnnnnnnnnnnnnnnnnntgaagtcgtggctctcattgccacttgacgagtcccacggaatacatgaggggtgtaagtctccatagccgaagacttgtaggtttgagtcatatgcctaggctagagtaacaagctgtcccttgattcgagctagaggatgacatggagaaaagcgaaagcaacatccaaaaacttgagagcatgatgtcttcccttccaatctcatggtgactgaaacttcttatttgtttatccaacaccaaacaccgtttgtacagcagagttccaaaagacaaactttatattaatattaagcacccgccaaggacgagaaatctacctaaccagctcccactcagcaacataagcccaacccataccaacacggccaaccttctcctgaaactcctgcgccgtaacaccactagcatccttccgatccccaaagctagtcaacacagccaactgcagcttctgaccaggtgcaccgagcatacgcgcactaggaacatccacataccagaactcaccaccgcccgcgggtccggagcctggtacatgcgtgaaagggagtttgtcgtcctcgcgcccgtccacgccatgaatcataagcaggaacaagcccgcatgctggatgtggctgtggcgagcgagggtccagtgcggacagagaagaccgaactggaagcgcattgcgccaggcgtgctgatggagatgtgcaggccttgtgggtggaaggtcttccggccaatggtgcgcttgtcggcgtcgctgtagacctgtagggcttggacgccatttggtcgttccgggtctgtgagaatatactcttcccaggttatatccgggcgtccgtcctcgcggaaaaactggcgtttgtttgatgggaagtgctttaggccgaactcttcgttcggcattgtgaacatcgacggttcgaatcgttgcttgtatggctgcccggcgccatctattgctcctgcaccccagcaggagtcgattagtttccatcggcctccatcgattttgacggcgttccaggcgtggttgccttcgaatggtggcaccggggcccctggagcaagtgcgttgtgtccgaagcctttgccgtgaccgccgactacgattgcctctaggccggcgtgggtggctaatgctgcaaatagtcccgcgtagccttcgcagactgccagtccagatgcgagggtactggctggcgtggaggacttcacgcaattgttaaagaaggcataggtatcgtaggcaatgttatgatgcaaccacgtaaatatcgcgcgtgccttatctgtcaaggatgggaacggcgctgtcagctcattggccagccacgtcatatcctgcgtgggaagcgatgcacgaggataccgggccgcatggttatcaggacctgagaagtcccggcataccatgcattccgtgtctgaggtgggaggtggagggcttggagacacagccgagccattcaaacgtggctttgaagccataattttggataaatccggacgagagccatgtggaatcggtggtggtgttccattgggggcagctgtgctggatttgggattaccaaacccgagctgcctaggatcctttctttgcgcaggcattggtggaggaggcaatgtcttccggataggtagattaacacttgagtcatcaccagttccatttgtgtctgtgggtaccgcggatggccgacgtgatggcagtcgaggcaccgggggttgctcatcctcataacgtggaggtgactggttaggatttggagaggaagtaggacgaggaggttgagtcggctgcgcaggctgacttggaatagagggaacgggcggtttggaccccggtagcgatattttggaggtcagtcgagcagacaggctcccaaagctcctcttactactaatcgtaggccgcggggccggttccaagctaacttgctcttttggtctgcgggcaggcaacgcaggcagctcggtctcaccccatgcgggcgccttgatgcgattgttcccagtagagttcaccgaagttgtcgatgtgcctcgccccgtagttgtagttgtagctgtcgacgttgtcgaatgtgacgcatcggaagtggctgactcaagggatggccggcgcttttggtccgttggcctacgcggtggcagcggaggacgggctggtgtagggggaggcaggcgatctgaccttcgcgtgggcaatggtgggggggcttttggctttggtttcacttgaggccggagagtttccattggaggcggtcgcaggaccggcctctgagttctgttatctgcgggttcatttccgacagatgttcgatccacgacagagccgactgcatcgtatgagggagggttgttgacggacgcgctccgttcggtcgggcggaatgatggtccaggtcctcccggtgggcgggccagttgcgactggttaagggcggcgatccgttgctggatagaattcaactgaggatcttcggccatggtgcctgagcataatgatattgaagagaaagttgagacgtccgctcgagcttaggtacctcgttcttggcttggcgggggcgaaaatagccttgtcggactctgaaacacgactgcgaattattactgacaaggatagtaggccggttatgcggcttgtcatgtcatttcgtagtcatttcaatagtcatttcataggcttcttggattgtatttttagatgtcttctttaggtatcttctcccgcttcttaagttttgggtagacggcgggaaaaggcggggaaagatttaatttgtgcagatgaacttctttgtataaccttagataatttgattcaactagagtccccgagagaaacacggcgaaagacaatacaagaaagaaaggaattaaacaacaggaggctcaactaaagaggggtcagccctggggcctacccatgggtccggatctatatttggaaattcaagttacggatctacaacatacacagtaaaaacccgatgaattataagttgcaagcagaagatgtttgaatttatttccagaatatcatgattcggagtcccaaacgccttgaaccggtgaagccctcaaaaaaaataaggaaactaggtacgtgcagatggatgaaggaagaagatgaagcaaagaaaatgacaaggagaagggtagcagttaaagaataagaagcctcgagatctccaattgacagcatgcaacccgccagaagaacccgaggccgtgatacagacataagaaaagtcacgtacatcgttggagaaaagaaagggaaattcacaaagtggtaaagccgtgggggtagagggccagcgtcgatcatcagcagcgtcacttcgtcccaatgtacatcatcgtcagggcaaacttagacattcttgtagaggagcaggggctcgccaacattctcgatctccggaatggtacactttagatcgaatgccttggctagaacgatcttgaagatctgcagtgggtcagtatgtgttctatcagacttggaataaaccgagcaacagggtgtggacggctgcaacttaccttttgcacattgatgctatggctggtgctgctaaatatcagactagccttcatagccttggcaaatcgcttggcctgcaaatatgttagtaatcgcggaaaaaaaaacgaggatcacacgtacctggatagatatctcctcctgatcctcacggggaaagttcacaaagtgatcatacttggtgcccaccaggaaggggatggctgtcttattgaagccacgtccctggcgataccactccttaatcgaattcaatgtactcttgcgagtgagatcaaacatgaaaagaattgcaacagcgtcattgcagacaagcggtagcatattaacgaactcgcgctggccaccaagatcccaaatcgagaaggtgatttcagtgtttcgaattgagattgtcttttccataaagttgacgccttcacaagtccttggttagtaaacagagctactgtagaacagaaattcaacttacctaacgtctggatgtaatcctcgtcccagctgccctcgacgtacttgaccatcaaactagtctttccgatctgcgcatcgcccaccataccaaccttaatcaccacactgttcttgttagcctgcgaggcttggcgctgaccggcgtcttggtgctgcagctgggaaacaggggcccgttctggaccactagagagtccagatcctggcctggagttgggaacaggtagagggtggtggctgagcaatggagatgagccctggcgggactgatcagtatcttgggcggcgtattcgggagcagattgatgaaagtcggtcgatcgggagtggtaatgcgccttcgaatcgctgttatagccattgttgatggccgcacggctaatggtgtggtcggaagccggctcttcggtattggccgagataggcgcaggctgttccagaggttggtctaaaggttgttcaaggggctgttcgggcgcaagctcctggccctcctgcgcctgttctgtctgatcctccggagcaatctgctcggattccgcaacgacaggaacagcgggcgcatccaccccaggagcaccaagagggtccaaattaggctccatgacgtttcaagatcggtttcggtgtagaattcagagaagcaacctgccaacaagttctgactgtcagcatatacgcgcggggtgaagaagctcaagaggggactaaccaatatcacaacgggctgaaattccagcgcaatctaacgagattgcatgtgtactgcctcaggggattgattttgagaaaattgaagaggccgagctgtgttggttctcgggggggtcagcggacaagggttgtccctgagtaaacagaccgaattgggaggggtgacggaaatgcgagtcaaagcaaacaaacgcaggaaccaggctggaaataaacgtcaaatatttgactccttcgaaactgcggggcctaggcactaaataagaacgtcaaggctctctctggtgtaccttcagctcgagggtgggcaactgggatcttacgctaggccacgataggtttagcgccgctcccacgctgttgccaaaatttacgggaaaaaaaaagttcttatcgcacatccccctcctcggtctcgacacccttataattaacactttttacgggttcaagatgtccaagagaagcgctgaagcggacgagcacactgccgccctcaaggctggcgagcggccaattgcagatgccccaatggacgaggcgggggagttcgaagacgagtacgaggatgaatttgagagtgaagatgagattctagaggccggagtggatggtcgcccagatgctgagcgcgaggaggaagagaagggtgcgcattcttcaatcctcagcctgttcaactgaactaaccttgtttaaatcttatagaagctatggatgtcgacaaggagactttcattcctgggcgaacaaaattggctcccggagagacactatcgcccgatccctccacttacgatatgctccacacactcagcacaccatggccatgcctttccttcgatattgtgcgcgattcactcggtgataaccgcaagacctaccccgctactgtctacgctgttactggtacacaagctgagggctcgaaatccaaggaaaatgaactcatggtgctcaagatgagcggactgagcaagatggagaggggaggtgaggattcagaaagcgactcggacgacgacgacatgggcgagcccattctggagagcaagtcgatcccgcttggctcaacgacgaaccgcattcgtacccaccagaccccctcccagtccggtgattactccaagcccccgcagacccttaccgcgacctggctcgagaactcgcaagtcgtcattcacgatgttaccgcccacctttctagcttcgatgttcccggcactattcttcctccttcggcatctaagcctctttccaccctgcgcatgcacaagactgaaggatatgcattggattggtctccgctccagcctcttggaaagctgttgaccggtgacaataacggattgatctatgccaccactcgcacagaaggtggcggctgggttaccgacacccggccgttcacaggccatgcttcctcaattgaggaattgcagtggtctcctaacgagcgcaacgtgtttgcatccgctagcagtgacggtagcgtaaaggtttgggatgtgcgatccaagtcgcgcaagcccgccgtggacgtccaggtctccaaaaccgacgtgaacgttatgagctggtctaaccagaccgctcaccttttggccactggagccgacgatggacagtgggcagtctgggatttgcgtcactggaagcccaatgccgcggcgccttctgcccagatcacctctacccccgttgcatcattcgacttccacaaggagccgatcaccactatcgaatggcacccctcagacgacagtgtggtggccgttggctcggcagacaacactgtcacactttgggatcttgctgtcgagctggacgacgaagaaagccgccaggccaacatggtggacattccttcgcaactgctgttcgtgcactatatggagtctgtcaaggaactccactggcaggcacagatgcccggtacgctcatggcgaccggcagcagtggattcaggtatgttatattcgttatcatgcggttgagccaagctaaccagttccttttaatagtgttttcaagacgatcagtgtctagacgaagaaaatgtatctacgctccgactaactcgggaatttcatgtgccatgtcttgctcatataccattcgaattctgtggattttttgctcctcaatatcattatgctcggagttagaccctttccttcagatggtcagggtggtgaagaaaaagtttttgtcgttatatctggcatagtaaatagacagatcgcattatcaatgaggttgatatacattctgcagggatggtacttgacagttgacagcggaatgatccaggcaactccgcctcctttgacagggcaattctgcaatgcaaagcatcagcagagcatatgcagcggaaatacccctatcactacttccacggacttatccaaagatgtgaactcgctatcctcgcctattcaaaacatcaaacatacaagacgttggcagggataacctgcacatgtgcaaagtcacaggatggaccgtgtcagatcgccaatgcgccattaattactccgtacagacagatacatatgcagcctattacatgcgacgtgacctagtacatatccgtagcctttcggcgctgacttggcctggggccgagtcgggcgcgacgaatgggccagtcggctcaatgattctcgacgtagctgaatatctttctttctttatatacggagtttatatggacataaaccgataacatttgaaatacagaatcaaaagtggtacggatcacaatacacatatgttgtagtccaaggttgcgaagctgttaggcagatcgacttggctgcgcattgtggcgatgtgggatgttttctttgttgtcaatgcgaaaagacccactcgacggtgctgtattggacgattattgtatggatattgcaatgccatggcatacataagtacatatggagcctgtggagtggattaacgctctaggtatgacatgcatgaattcgaatggagactgttgcgcgcatttgtgtcagacggatttgactgttgtgcttgtgtttctcggctcaagacatcggagtcaggtgagaagtatattatatagcgtgtatatacctacatgtagtagtctatactgtctatgtgagatacctcggttgtggtgatacctagaagcagtgcgtactgtatatgtattcagaaatgtaaatctaataatcgtatggtacctcacgctagaaaaccaatcgatctgatctaccggccaagtctgctcctatccaatctggaaaagagcattccattctctctcgtcatcgtgcctcgaataaataccgctaatgcacgcccgaatccagcccaatcacatcagatctaacttctgtcgcgtttgcgttagcagagcagaaacataagactaaaatagctccatttttgcgacatcggcttgttcgccggtcgaataatctctccgatatcactttactatttgtcaagtccagcctcttttttctcttatcggagaatcgagcggtctgttccgccggtaatttatgtacagtactgaaagaccatatgatgtcgaggtactgatgttattgccctataacataataacataatgttgcattcgatgtacatgtgtacattatagttactgggtacactccatactgaaactaaatataaacatcttcatgtttgatcttagcgctggatcaaccccaggactcgccacaaatgctcttcatttccttgatgaaaagcactgttcctgggcaggtccgaacacaaccaacgccgtaccatggcagcttctccgatccgaccttatacccacactaaaccttgatcgtccacagggactcggcccatccagtcagaccgcgagcctgagcgcctggcgaggtagctatttgcgatctgcttccgatgtagtattgctacaccgttctccgtactccgtactatccactattcggagacatagcgtcaatacggagtactccgtacggagtccaatatccaatatccaatatccaatatacaaaatgatagctaggcgtttgttatcgtcaatatacggtgtcataataatgatatctggagtaatagtccaggccgtatcagccaattgttcatcgccgggcccattgctttatccaggcacatggccgagaactgcgcagatcaatcgacaatactacgccgtaaagaattgtgtctctccatagctcgcgggagctccactagcctccatatcttctatccactccattgctatgaattgtcattgcctggattgcgattgcgtgtttcgagtaaatatgtggccagttgatcgtgtgcgacatttgacttggttctggccgggatgcattttcgccaattgccgttatttcaggccttcggtcccctcgatgtcccggcgctgatcatccgtgctgtcaccccacgtctttttgccgctcgatctggaatggcgtggttgacttggtgcctttttattatgatttatggttctggtaagtcaagatacataagaagaatacaactgtggtaggtccgataaattcaaccgagccattcgactctcgagttcggttgtctgtattaacggtttcattgtggacctaaaatgacgcatggggccgagacaagagcctcactgtgcaagagaattaaacagagtgacatacgaggcgaactcaggcacaccgtattcttctttgggctaatctgattaaatcgaggtcaatccggaaggaatctacgatatactgttaaggtgcgccaatgacgccttatcgactgagtactattcttcacagaaataaaccacccaacccgggtgcatagtcacatatccgatgagctacccggtaaggacaaaaacaaaaacaaaaggcccggctgaaagtccgatcaggggtgtcaattccgccatcccgcattgatgccagcactggccactacggcccccccatgatacgcagggatgggcggagaatttaagtgggacgttttgatagctagacattgcctgagccggtgttttatcggctgtaatttattgtctcgatgaattactgcgtaaaacacggaaaagggaagttgactgcgctgcatgttatatagtgtatattgtcagatcatctgcgaagcgcggttatgcaatgacgtttggtggaatcggcgctcgatgtatggctagcgctcatacaaggatgcccttgttcgctagtatatatgtagtgtcaagtgtagtgcctaagagtgcaggtgcagtatcatcgcatgattagggccagtggcgtctgcccctgagttactgatgagctcatgacgaagcgatggatttctcaatgaggacctgcatcagaagattggttggaactgacggatatcggcgcaaggctgtatcctggggttaaatctgtctatttaggctatatggcatttacgaacggcttcgctgcgttgcgtaaccagtatcagctgtgttcaacaccggtgaagtatgtttgggttgaggtgtacgatgctctaaatatctagaggagacatgtcttcgccagaaccaatccccttcatctacaatatagggctttcggatatactccgtggctcaatgtcggacatatcggatatattgctcacgaggtcaacacggcaattacattatacttgcatggacgcatgcaaattattggaaataggtcggatgcctttagtatgtcgatgttcttaaggggaaagccagacccttgcagcttattcaccattgggatagtccggatcaaccccgacatcaacacagcttagagacagctcactgcgtcggagctggggagggtggcttgcggcactgccatttcatttgtcaaccacccctcttgactcatctcgggtcacctgcagcctccttagactctccctagtgtgcaactagtgcattgtcaagtccgggggattctgcaaaagaggtgtccgtgcgaccaaatgcgagtctacaatgtattccagacatggcgagggttggaaaaaacagacaaaggaaagttgacaaagaagcgttcatagccgtgtctgtgtgaccgctttcctctttgtctgcatccaagtccaccttggaatgaccccaaagctgtgttagcaccgagatactggatcgtcaccataaccccagatccgacaccgatccgatggggtcggctgcacgcccaatgggctagggtgcccatgctcgcctcgttccgtgcgacccaaactcaaaacggcgtggcgtaacgtggacaacgagtccttacagcgacgggatggagattctagaaaacgctcgaggggcagattccggggaaacccaattaaaagtctgggggagccaaggacccgaaaaaaggaaagaaacaaaacgaccccatccaatgttcccttcaaattacaacccttcgccacgccagaccatgtgccatagggaaccggaggatattccttgtcggcacatccaattgcagcacagccgtgcgtgttatgtacatattccgttttatgtctgggggaattccccacacgaacccttttttttttttgacttggtctcccccacaaaaatggcgcatggatctttccgcttgtttatacccggacactccgctctcgggatggattctggaatgtttcgtttcgatgtcgaagtgagccttggaaaggagggaattggaggcgaatgggaataaaagaaaataaaagctgatagaccggtcacgagttctatactacatatagattaccattatgataaaaacgtgtatgagcttgttatgctcagtaactctcgggcccaccccgatacttccaggaggcttagaggataatattaaataattaaaacaatatccacccggggcaggaatttggttagtgcagccgcgtattctttacgatatacacacctgggcagttatcatcagttgatgcaattcagttgaaaccccaaattcccaaattcccgaatgtccgaattcctatttaattcaatcagtcaattgcattccagagcatgcaattcatgtttcatgaaacggtaaataacatcgtacgcaaataacacaatactagtcaagtctggcgttacgccgctagtcccaacacggcaagtacgtggagaccaatctcgttgataaccagagccaggaactggtggacatccggtagaacgtgcgtgtccgtaagattcagtctacgccgcattcggtatcaccctagttaatcgtgggggcatcattggcagagacgatcagcccgtgtgtcggggatccaccacctgcgctctgtatcggtaccgtctgctgactcgtccgtcactcgtctgctgtgcggttgtctgggcctgacatcgccctggttggtagttgcctcgtatgtaccctcggtgtacctttgtcctcggaccctcttatcaccggtacctccagagtacttccccccagcatttcccggttcctctctacccgccactactgccactgccaacggtgtatgtaagtaccctggcccaggtacctctcgctctgctgtagaacgactctggatactcaaccttcggaggcaatttcgaacttcccaactacttccacctctcctgccatccgtctcttttcatcatcgtcgcttccccggtgttgtcgtgggttctcattgcttatcgacaattgcctatctgcactccatcggttatctttggcttatccaactctctccaagttgcgagatcaattcgctcaatggatgcccgagtttaaaagcatatacaagtcactgctttagctccgccagtctgatgtgagtgatctgatcgaagtgcgatggctgagtatcattcatgttggtgcagtccgctgatgtcgccgattacaaacagacgtcaagcactaggctccataccatacccccccccccataccggtctcaggtcctcataccctgcaataatcgaatctcattcaacctcttctccaaacacacgccgaatccttcgatagaccgactgtaaatttgttcgccttatattggtgggtccccttcatctatctcacgacaaggttcctgatagcctcggtaccttgggtcgttgtgatagcaaccctctacgcatcatgcaagacacatgctgacttgatgtcatttggatggaacagtcgttgatgcggcacattgtacaaatttgaaagatcaaatatcgtgcccgacgcgatcttcgttccatcatacgattgacgcaacctctctttcttagcaatttcccgagtcgcaacgacttcgccacctccgagacctgtgagcaagactttggtctgtgaggagtttccaaagactagaatgctattggatgctatggtcggacaagatcaggaccataacccaaaagtggtggaccttgccagtatccacgaaattccgggaaatatgcctggtgagtttcgcaaagacaattccctcggtgcaattcttaccatatgtagctccaaaggacgcaaagaagcagaccgacctgagcggtcaaatgggtgccaatggcaacatcccgccccctaaaacagataagcctcggccccacgtctgcaccacctgcggtcgctcatttgcgcgattggagcacctcaagcgccatgagcgctcccacacaaaggagaagccattcgagtgtccggactgcgcgcggtgcttcgctcggcgcgatctgctcctgcgacaccagcagaagctacacatgaccaccacgccatcttcccgaccgagaaacggtcgccgtgagagtacgggcgccgcacccggtgctaaccgggttcgcaagaattccattgccaacagttcagcttcttcgatgcgcccgagggccaacaccatcagccacgttgagggggcggcattgggtatccccggtgccggtaatccgtcatctgcgcccacccaatcggctcacgcatatcaccccagccttagttcttcggtcggctcaagtatggactataggggattcggctctggacacacttcgatgaacggcctcgcgaagatcgaaacttccggacttcctatggacatgtccggaggacttcggactgctcccgtgtatgggagctttgacacgggtatcgatggcatgctgatgggccacggtagcaccatcaacccagcgcaattacactttgcaggatccccacaaggcttcaacgattcgccctcgtctccgttcggtcactatcacaatggactttcaaccactgcggatcccatgatggatgaagatatgcactttgactggatgaacgggtttgacacaggcatggttatgggaaatggcaacgactcagtcattgacgagtcatcgccatccgcaatgagcacgggtagccaaagcggaatcagcgaggccatgttggatggtccgaatcgcattcctatctctaacggttggcacaacgcgttcactgcccaccacccggccaaccaattcgccctcgacttttccccaacgacgttgaacgatctggggttccccccggagacagtgtctcccaagtctctaatggcccagaatccgttttctgagacgtacgctacccccccatctatgacctcggtcggccagcccgtcatgggaggacattctcagagtatgtttccctctatggcaaccaacggagaatctcctaatcctctcaacgttcctttcccgaatagtgccctacgaaatgaacattcaccagtctcaacggatacatttacagactccacacgacaggctctattagcgagcatgtcgacccccactggcttcaatcatcgcaagtattcccagcccgcaagtggacttctaaacagtcgcgagttgttcgcccgttcgactggcttcaacagctccagtcaactgcccagcacctcggacttacaacggtacatttcggcctacatcacctacttccacccccacatcccgtttctccatatccccacgctcaatttccaagctccccagtatacaaacaacctgcgcacgccaagcggacacctcaatctcagctcgaccggcgtcgctggaggcgggggttgcctgatcctctccatggcggctattggtgctctgtacgaatacgaatctgccgcctccaaggatctcttcgacgccgcgaaaaagatgattcagttatacctcgaagaacgacgaaaggccgacatgtctgctgctctcaatcgttcacattcctcccgcgatagctcagtacacaacaccccgctttggttggtacaagcaatgctcttgaacgttatatacggacacacctgcggcgacaagacatccgcagatattgctagcacacactgtgctgctttggtcagtcttgcacgcgcagccgaattgacacatcacctggaccccaagaacctgccgcaagatcatcttgttgctggtaaaaatggaaatgattctgctggtgactcggaaaactggatgtcttcgtcgtttagtcaaccgaaagagcgccgagattggctgaattggaagattggagaggagcggaaacgtaccctctacgctatctttgttctttccagctttctcgtctctgcctacaaccattcacctgcactcacaaattcggaaattcgccttgatcttccctgtgaagaggacctttgggcagccgaatcaccccaggcctggaagaagatgggcggccaaacaaaaacctcgtccttttctactgctttgacgtctcttctaactgccagccaacgagagcagaatcaatcggcgaacttgttccacaactctgacgatctctctaattctgaaaaccgcccgagtactttcggctgcctggtactcatctactcactccacaactatatctgggagactcgccaaaggcacatgggccgacaatggacaccgcaggagaccgatgctatgcaagcccacatcgagcccgctctacgggcatggcaagcagcatgggctagcaaccctgtccacagcctagagcgaccgaatccgttcggggctggacctttgtctgcagacagcatcccccttctagatttggcctatgttcgtctattcgtcaacctaggccgatgcaaagaggcgttctggcaacgcgattggaatggcatggcggatgagctcgcacgtggtactgagattttccagcactcagatgctgcaatgaacgacgttgtcgatccgtctctcacgggtcacattgacgtgagacgagactccatcgccgatttaggagtttcagatctagccatctccaagacaccgacacaagatgatcccatgcatgctctctccaatatatataagatgggccaacctaagcgtgaaaagcacctgcgcaaagcagcattctacgcagcagattctatatctatgtcggatcgtcttggtaacacttttgccgagttctcgtcgcgtgaactacccatccagtgcgcgttgtgtgctttcgattgtgcacaggtgctcgcggagtggatcactactgttcaagaacgggtgggcccctaccttggtatccttggccgcgacgatgtcgacttgactcaagtacctggagtcatgctattagaagacgaggactgcaagctggtggacaagatcaaggaaatcttgcggagtattgagatgaaaatgcagcgccagtaccaaactggaaattccatgtccgcgctgagtgctgtgcaacggctacccagtcttgtggaaggaggatacggatgtaaaatattgattgcgacagccagtcttttggaacgagctgctgtctggccaggttagtttcagccatctccaaacttccacaaatcaaaacgattctctaacacctacccgcagtgacgaaactgatggcccgctctctggaagcccaagccatgcgaatgaaggagcgtaccgagcactccgtgatgatgaccccttaatgaccattcccaccaccatatattgcccccatctctccaactcctatttcgcattcgcgcgcgcccgtgtatcatgaataaacaatccaaggcaacaacaccccttcttcccatcgaagcatgtgtatctgcaccaataacccgcacccgttccctccctctctctcgcaacatgcgtaccgcctttgataccctgctttgagactttgattatctgtgtcatagacaaattgcctgctcatgtcatttcatgtttctccgattgttagcgttcttgctttttgtaacccccgactgatgtccttgctgtggtgtgatgttgaattggagtgtggaaatttctggtttcctttcctcgacttactgacttcggtcgaggctgagatttcattattctttcctttgcctgtgcggtgtttgattatccagaattatacttcgtgtgaatatgatttacctttcttcaagggttgctgttagtatgtaaactgctagatcacgatctatatatgccaacttgcaattagaatggttatagctgctctgtaatttcgtcatgatcgcaactgctgaagttgggtgcctaatgtattcaaaagtggtagaatactattgggtaaaagtgacaaggggtcacgtgaatgaaaaggtatttcggacaaggatagagcaggcgataccgccatcgtccactcctgcttttggccatgagctcgtctgccaagcgccctgggcgcctcgggggcaccaagtccaagaccgggtgcgatacatgcaagtcagttgccccctagaaagtcgattagtagccgtatttgacatttgattcgcagaattcgccgcgtaaggtgtggagaggagaaaccacactgcctgagatgtactagtacaggacggcggtgtgcctatggcgggggtcatgccaggaccattatcgggcgactccagccggacatcacaccctacacaagtcagggatcgcgagagcgtcgttctttcgaattttatttccaccaagctggcccatcactttcaggagtcctggatcaggctttctggagaggatccgtcctccaaatatgccgggtagagccacttatctgggatgcgatcatctcgcttagcgcgctctacgagcgacctcccatttacgagacgtcgccgtggtcgcttataaatgatcccgccgcggtacgacatgagtaccatcacgaagcgctggtctggtactcgcgctcactggctcttctacagcaacgtattaatcagggcacggcggacctgacggtgtccttggtcagctgcattctctttattgccattgagcttttacaaggaagccgcaaagctgctcagatcctgtacaaacatggtgcgcagctggttttcagtgcttcgtcaacagcgacttcgactattgcaaccctcgagcctatctttcgccgtctggggacatgggtcttcctcaccaatggactacctgaagaaagctgcgatcttcatttggctgttccagacgagcaattcaaatccatcgaagaggcgaggaacgtcttgtgtagcattgtagccgaaatgaaggcccttaacattgactccaaagcttatatacaccgaacagcagatggccggctgcacgaggtatcggagttggcggccagacaacagcacctgaaaacccgactcgctcaatggtatcgcctctttacagacttgaaccctatgcttacctcgaacgtcgacggtgcaactgcgcttcttctaatgacatataagagtgtcttcatcgaagcagaagccatgctgaaccctgatcaaagtgtatatgacgcctacgaatctgaattcgcccagatcattgacctggcccccaccgcggttgcatggacacgcagctcggaagggaaacaaccaccattcatgtttgagatgggcgtgttccttccacttttcataacagggctcaaatgccccttcccacaactacgccgccaggcgttacggtacatgggggaagctcccccggcacaagggctgttcatgtgcactccggccgctcatatcgtggccattcttattgggctagaagagaaccccgacaccatgccagaaaaggtctcgcaggtatatgagctgctggccaaaccggggcatatcccaccagcccagcatcgcacatgtgattttagtgtgtcgtcagtcatggataggcatggtaggacgcggaatttgttgaattatacactttaccattttgatgatgagggaaggatacaaatcgtcgagaaaacgctgccattccctgcatgaggtcatcagctttaatattttttatgataatacgatctaatctctgagaacacttctacaaagactactagaaaagactgtcgtctaagcgcagagtatgtattcttgctctcttttagttcttagtatatctaaagtataattctttatttattcaatccgcacgacctcgtctagtagtttgttttatagaaataaagagtgcaaaatgattgcggtgagccaggcggtcaaggcctactatgggattaggggataaggtatgatgacataatatttccccacccgtgggtctcaaggttgctggggcatcaaacgcgttaagtggtttcgcgaaccataatctctgctatatctgcctggtatcaatcgcacatggccagtctatctctgtgctggaaatgaatacagcctccaagcatccacctaaaaccctcccatcgcagcgtccgacagccgcggcttctccacccaagaattaatgtccgctcagctcgaaactcaaccccaatgccctatccacggcctgtctccccggtctctctcgaaacatgcccgcactcatcctcggagatagactcagatgacctggttgcctcggatgatgagttggatggtgctgcccgagctgcaaagcgtcagcgggtcgagaagttggcggagtcttatctgcagggcaaaccgctgtttattctctcctcttcgctccgaggcccgcttgataatggatgggcgaatccatggaagaaaaacaggacacggggtactggcgcagcagtgaaagctcgccagaaaaatgttcccgagccggtggtcctggaaactgatttgcaggcctcgaaataccgaaaggatctatcagttggtactcgtcgtccggatattccagcgacatcttggaactcccctaggatctctgtgcaaatcggagaccgttcgtcaccctctaaatcgccacggagacatcccaaggaacccatcccgcgctcggggcatactgggcaaaatagagcgttgcgacggtctcccatcaaatcaaaggaaccgccgtcggcgacagtggatgaaccgtcgttaatgccgcctaggacagcggattggctgaagaaggatcggaagctcatgaacttcaccaggtttgaaccgccgagctcgccaacaatatctgttgcttctcgtcagtcggacaaagctggtcgactggcaccgcgctctgttcaagtccaggtcccacagacgccggcatctccagaaaaatgccatcctgtcaagcctgtcctagcaaagacagctcagagtgctcgtgtgaactcgaacgagcacgtatccctgcggtccattcgggccaccttgaattcacctaaggaccctactgttccttctcatttgccccgggagccgtctctccgaatcgttgattcttcctctcaactgccgaggtttgaataccggaggtggccccgtgaacgttctagtcaacagctgaagacttcccctatgcgagatgaaagcatcttgcaagaagagacttttatacaggaggacagccctctgaaagaaaaatccatagtcgatctcgaacctgccagtcctagtcccgctaaggatcaagcattggatcctgctgaacctgaacccgaacccgaacctgaacaaccacaaccacgacctagaactgaaactgaaactgaaactgaaactgaatctgaacctgaacctgagcctgaacctgagcctgaacctgaacctgaacctgaacctgaacctgaactcgaacttgaatttgaaccctcggttcctgaagaaataccagttcagaatgaggactctatcaagaaagatgcaagccataagaccttgtcgaaagaaactaggtttgcagatgaggatgatctcatagaggataatcttggggtggaggaagccgcagcagaaggtgccgccgatgcagaggctgtggcggaagatgttacaaccgagaaagatatatcgacattccaaaacacagatcactctggatcaactgaacataacacctacgatgatctcccttctgcccaacaagtgccaccccccttgggagtgtcagaccgggtaacgtcgcttcactcgacggctttggcaagagtagacccaggacaagactctccccaaagccccgatacccagctttcgaccctggctgcccttttgcatgcccagaggtcctttcaagacgacctggacagtccagaatttcacgctgagacaccggattcggaccgagcagtgcattcacccgatgcttcacttcgctcagccaatgtcactccattctaccgtctagaagagtcgattcgacgtgatctagaacggagttcaatatccaagaacaaggatgggatgcatgcaatgagcacgcaattcatgctcgatgcagctacacctttcaatttcagcactgagcaagctggtcaagatcggagcttgaaacccacgaacagaaatatgacgcaagcaatgaatacgcagttcatgctcgatgcagctacaccctacgcttttagcacagagaagagacagcgtacatcccgaccagactcaggttcacctacggcgagaggctccaagagaaaaagaacggccaatatcggaagcccttctccttctattaggagtcaatcaacatctgtcgacaacgaatatcacactgcggaatcccaatcaagcgaagatgatgaaagctcacgatcagtggccgagcagttggaccatcaattaacttatcaatcccccacagaagctgcgtccttacccctcaccttaagcgaatcggtgccaacaacaggccaggatggacaaggcgttcgccagggaatggagagcttcaacctcagtcaggcaattgcggatgctggtagttggcttcaacaaagttttgatttcatgagcagcgctcggccaagcaggagtttcaacgcgattcctacttctgacgcgcgcccttcccctttaaacatggatgtatctcaataacgagaactccttgatgctagcgactaagttcctcacttcttggtcttcccatcttcccattttcttatcttccatagcgtgttgagagcttcagcttggtagcgaagctgttctggacatgacaagatcgtatagatactgctcgaccacggagtcaaacaatctgcaccctatcaatctcctttcaaagggtttaaaagactataagacttacagactacacagcctactcaaatggaaccatacttcctttattatcaattcctcggccatttagataacggcgctatgattctcgtcattggccatgagccacttaatgtttagtcatcggcttgaaagcatcttcactttacttcataactatgtaccggataatggacttagtcatgaattccaatatcattttcggttataaatctagagcaacggagacgcaggtgtcagattccaggacactctcagagaatagactgaacactcggccaacgatactcgatataaagttcggagctctcaatattaaaacattcggctgattgattctctacactagacttactatttttcttaccgcaaacagcatctttaatgaggagagaagggcagccttagccatggaaaacggaatattattggtagttgttgaaacaaacaaggggcaatatatgattcaggataggcgaccagaatactagcgtattacttatgagattgaagagcatgctataggaatataataatctcgaaatgttttgggaaggacttttgtctgaaatctgttagctaggaaatggataagaatcgaacgcagccagttatctcagtcctaagctgcccttaaggactaactcagactatttattctgctgagcgaagaataagtttcgaaaccgttagtattctaagtttgtctctacctaactattccgttcgaataaaacctaatgtaacattattatatagattcttccgatgccgcagaggacaatgacagcttgctataataggaagctatcccaaagccaggcatagaaacgtacgcctttcagcatgggaaaatccaagaataaacagcgattacatgctatagcctgaggcagttggcagtttcgaagtccggtactattaaatgcttccgaaataaagatagttggcaataccgagggaacatttcaagccactacttattaggacatgtcttatgtatgcttgatacttggactctgagttcgcgacaagtcccaaaggcccaaatgaaagatgcaaatgggctccattcttatataaagggcgtagttcccaagagactacgcaggggtcctttggctgactggatttaagtaacatgaccttctttgagatctgagagggaacagacccgtgcttgaacccccccagtttgatgtcacctactaaaattcacttctacttacatatgtttaacagatacgtccagataaacgaataacaagctgaagatgaagcagattgttactcactctagatcaaagtcaggatgtttgagaatttttcagtgttattgggcactctgtcgctcatcacttcttactctgttcttaaccgtttgttctttgccgtttgctgttcacaaattgttgctgactatttgtactcgacaaacaatttcactgatcattgggacatacaatagagcaaccaaaccctcaataagatctcagacgtgaaccctgcgagtcagttctagcttagtaggctatttagtataagtagtattaagatacagtgaccataaagtagccatagtatccttaccgatatttattaactagtatagaataagatgataaattaggggacaaccgttatcaaatttagaataataaaaacgttcaaccaagcaacctttggcctaataggccgaacaaacagggccctatggttcatatggggtaataggaagcgtgcatgtacagccaaggtcgcggttgaaacggttacagttgttaaggagcgctgttctactgttagtaaaagttcggagatctaccatgacgacctcgggagttagagatctcttttataacctagacattataagtaggtaagtataattaaaccgtttgcatgcagaatatgaggacctgtgaaatcgacgccgaaaatatcagcttttgacgccagagcggctatagtgcaatgcacattaatatacacctatagattttgaatcatgcaagtacttatagaaaggggtgctcgttgacttaccagcctgcatttgatttttgctcaacatgaaattagttgaggcagagtggttccagcatgcctcatttgggcagacatcctcaccaatgtttctcaacacttgtcatggacagacacggctgagctggtgcaaaacgatgcatgtgagcaaccagacaaaccgaggagtctacaaataccgcccgtaagatcttcgtgccactggatctctacattttctatcagcaaatccattggaatgaaacaagaaatgatcctgccttgaaagagcgtctccttctcaagattgtatcacgcatgcgttcgatcgtattacaatctctcttacaccaatttagatatgcaggtcaaaattccaaaacaaaagacgtttgctggctcatacggtcattggacggcttaaatacagtgctcagtggcgcccttgatcacggcgaacaccccgaaggatatcgcaatcccggaaatcaatatcacgttcggataccgatccccatttgagcttcctggtccaaggcctaaccaaaccagacttcccacacggggcgagtaggcctagggcgcagcctccgtagccaatattggtggattgctcccttcattgcggtattgtcctggtctcgactactgcgccatgtgtcttggacttccgaggcgctgtaccttgcccttcatgtatcttccaatttcccggatcgtcactgtaaatacctcttttcccacccccatcaacctaaaaacgtcctcaacagatgtgccctctgcaccctactctgacaagttcaacatcttgagagacaaatcccacaacttcttctcgccctccggatcgaaggcgtgtggtgcaacaccgaccgccagtgtaccaccctcggggaccgggccagcttcctggcaatcctccagatagacaccacccttgccttcccattccttaccaagtgcagccgttatggttgtggcagcgccctgagccgagctcttggcatacttttgcgcaaactcacttgaaccccactccttcaacgtttccgggtcgacgtggcgctgtaggcttgtggcaataccaccaggcatcaacgagaggccgtgcagaccctttgacccgtatcggtgctcgatctcgttcgtcatccaaatacaagctgtcttggcattgccatatgccttccacggctcgtactcaccctcaaggttaatgttgtcgagcacaacagagctcatgtgatggccggcggaagagacgttgacgacgcgggattggaactcaggtgtggaactggacaagagcgtctgctcgagtagcttgtagagaaggaagtggccgagatagttgattgcaagctgcgactcgaagccgtccactgtcttcgcctctgggcatgccatgatccccgcattgttgaccaagacattgagctgggttgacttggacagaaaggtcttggccgcggtgcggacgctttccattgagccaacgtctagctcaagcagctccacacgaccgggttcaagtatctctgccagagcttgctttcccttctccaaatcccgaacgccaagatacactttaccaccagttgcggcgagcgcacgaccagtttcaatgccaattcctccagaggacccggtgagaagaaagacctgtttatggtcaattccagttctggtcttcagcagcagcaatgcccaccttgtccttcatgttatcgatccggtcgttgtccttgagaatgtcaagagctgtaggtcgagcgtctccaggcccattctgctccaagaaggcctgagtgtacttgccatgcttgccaatgtgattactaatgagcggattggccatgatggtgattgtgatgatggaggatagctggtagattgagtttgcaagtggatgctggggagaaggtgtatgtctggtggggctttatatagggtgcgggggagagcgtggtgatggggtgacttgcactggcacgacttggaacatgggtccagagctgaaagactgttcgaacctcggactttatttcggattttgcttaagaccgtttatcgggcgaggatattcagacagatccacattcagtactatacccgtccaattaagattaactccatcagccacgatattgggcttaaatccaccatatgaccacatcatcgttatttaacaaagaagaagggagctgaaaatgtggtttcgtcttttttccggaataggatagcagccgaaacgaatcgccaaaaagaccatcgggataagcccgagtcgggcaagcggggagacaggaacaaagaaacccctgttggtcgggctgccttgatggctccctaaagaggggcctgaaccctggcccccatacgtcttcggaccctaccaggttacctaccatgagaatgcatgcctggatgattcaagttagaaggcacttgaagcgcctcaataagtacgatgacatatgccttgataatcaaagtacccggattctgctggcgtttgcaaggccaaaaatgaatcttttactccatatacaccatataaatgcggactggcaaaccggtaaataatctggagatacctacatctgtatttagtccataagtttcattttttggacttgcaaccaccggaataatggagatacctgatttgtatggtgtccaaaagcttcatctaggcaggttgatgtattgacaattcaccgtacactgtattagggcggtatagaaagcagtactaattcaggtatcaaggcatcaggattcccctaaaaagggggtttgagggtcgcacaatgcatcttgcttaagcttaatctgtgtaacgcgcttcatgcttatatctattcttgctgaatctatacatttagttgtagcgacgcgtggtcttgctccactgctcattgccgctcatctggtactctaggcccttcatatacgccttggcagcttcagagcagccgtctggggatgcgatcttctctgccacgatctcgtcatgcacagtctcccactcccgagtcatagaccaaagcacgcgtttcgttgcgggtataccaagcttggactcctccgccagaaccttcacagctgaacaaaggaaggctccctccttgtgtccagtccgagacgcttcctcttccttgtcataactgtatatgtcattgactacagaaagctgcttggcacagttggcttcaagggctttcatatcctgaagctcatctgcactgagtctaagtcccatcgagaatctcattagagccgaaagcaacctggccgaacagtcagtatcacgagctcgaatcctgggcgagaacacatacgccttgcctacatccttctcacggtactcgagataatgccccaattcatggatgctcaaacgcgctcgatctgtctgcgcgcgcatgaacacgaaagtcggctcaagaacttcgttggccagctccgcatcatgggcgcgcatgctttcccagaggtcatagagaatgaactcttctggcttggttcggtccgggagcacgtctccacgcgatatcgggatcaatctgttgttgtaggcttctccatccgcgaaagacatatgctcaagaacatctaccctcgtcagtgaaggctacattaggccatgtcctttcgcactcaccatcgataaggaagagaacggtcagcagtcggcaggcaaagtggatgcgatcgtccagtgcaagagggaagtaaagacaagtaacctctgagaacttggcatccaagaaggtgcgaacagccttgaagctgggaaatttccagttctccaggaagtatccatcgacttcgtcctgtacctccttcactcgtggatggcaaaggtacgaccactgagtaggaggcggagtgatcgtcgtgtcatttctgggcctgattgtctctttgaccagagggctattgatagggttttcaaggtgcacgaacggttgggccagggaagaaatggtttctgttgaggtagccatgtcgacgctcaccgggtttgaagggttatactcgtggataacagctttcagtaagtgcgaggaagcatatcgtcgaaaaaataccagacttcggaaactcgtccagtcttatcaggagctcgaattgatcgtgtacgtaggactccgacgacctggatgaaactaattcgaactgtcacatctggtgttctttccgagttcgcgcccggtcaataaccagctgtttcgatgtgtcgggccgagtaccgtatgcatttgcggatttaattgggaaatttcctaaatcggcaaattcaggtagagcgccctcacaggaatagtgtactggacatgtcggccctattaggacatgccggctgggcttcgtagatttgcaccaaccccggcctgagtgagatgagtcagatacactactactaagcggaagcgaccatcagcaacctctacaaacgcagctattcagcttgccccttttggtgatgagataatacagaagctagaaacccctactgccatcaatgagtacaatcactatatcggtaaggtagactggtataaaccaccagagaattcaattctataagcaaaaaggcttgcgtatggtcctaatataagagacaggaatgtagcagcgtggctctatatgtgaaagggcaatgtcggcatgaattccatagaaaatagccacttcgaattaggtttaattgattaaactgcttcgtattactggatcattaccgcaattagcaaaataggacgccttactatgtatgcgctagtaaaagttgtgctgacggacaagggcatactcgggagtgactcggtagatacataaagatcctggccctgcagctgcatagtacctttctgcttaatattgttggctccaattttgatttcagtatctttctaaacaatcatcatgctttctcttaaagcttttttggccctttctctgtctattcatcttagccagggtcttgtggctagcgtctcgcaccgtcgcgctaatgcatgcactgagctctcacgaagctaccctgacagtaccattcaccctggatcttcagtctttgccgaagatgtaattggtaatgatcttctctctatgcatgtcaagccccccacgcggaaaggaggctaacacttgatggtgtagagccctggtctcagacttgtcaaactacgcccacgtgtgtttttgccccagcttcggccgaggaagtagccggtggcttggctatccttcgtaaagccgaccagacctttgctgttcgcacccaagggcatatgcccattcctggcgctgccgacatcagcaatggcgtgctcatggttaccactagcctgaatagcgtacagtacgcagacgactctaaatctgttgtccagattggcgcaggaaaccgttggctggacgtttacaaagtgcttgccaaagacaaccttgccgttgtcggtggacgctttggacaggtcggagtgtctggccttctgcttggtggaggtatctcttatttcaacagcggtatgttaacgaccggtcacttccatgaaaaattgaactaattgagcaagaccacggttggggagcgaacagtgtcgtcaattacgaagttgtgctcgccaacggtactgtatgcgcggcaaatgcgcaacagaactccgacttgtactgggccttaaagggcggttctttcaactttggtattgtcacacgtttcgatttggcaaccttttcggttccatacatgtgggggggtagcgctttctacgacgcctcggctttggatcccttggtcaacgcatacgcaagctacgctgtcgcatccggtggttccagcgatcctgcagctcattctgatccctcgatcctgtacaacgtgactactggcgaggtatcgggctatggtatctatatgcacagaggtgacgacccggcacctgctgctctcaagaacttcaccgatataccttctacattccaggacttccgtgttggaaagacaattctgggcctggagaacgacacgactcctgtgaactttggagtaggaaatcggagacagcttttttcgtccactgctttggcttccagcgctgaggcagtgtacttggtcaaccagactttcttcgacgtgattgcagcaaacccacagatcaagaccacgacggatctcagcgtcaccaatacctatcagcttttcacccctggtatgatcagagccgcaaaagcctcgggtggagatccgatagggctctacgacccactcggcaacggggttctgggtaagcatcttgcgactgtgtctaaaattacccagttcatgaactaacttcttcactagctgttctgtacggcggtaactgggccgatgccaaggatgatgagataatctacaagttcttccaagacatgatcgatgagctcgacaacagggcgaagaagttgggcctttactatgattttgtttacttgaacgacgcagcacccactcagaccaaggacatcttccagaagttctcgaacggaacagctttgccgaaactgcgggagatcgctgagagctatgatccagaccaggtcttccaaactttgactcctggcggcttcaagctcatcaacagcccagcatgaaagcttcgggatgggctctccatggcttcctctaccgccaaagtctcgtcgaggtatatgtttatcgtaggatgtggttactttttcatgtttgtataatgctatagagaagacatatacttggctcacagccgccccttaagcctgtttctccacatacttccccctcctatatctagagtgattcgggaacactaggtgtctgtactatcctaaggcgggtgatatttttattcatttagtgaggtatgtatacgagcactcggcaagatttccaaagaaatatgataaggaggggctaggcaagtggcaagctctttgctacctacttagctgccttacttgaatggataacttgtataaagctgcttgttcaaatacttggagaggtacttggatacatagttggctaggtactcggatggatacatgggtaggtataaggctcacatatctatgcggcaagcatttgtgactgtacttgattgcgggcgagccccgactcacggacctcgacttctacctgaagtctgctgtagcttgctgctttttggtcaagtcagtgttccgccagccaaaccagaccggccgcagatcagccaacttttcctccaattcagtgtagtgttctcccaacgtcaaaattgtgcgcccgttccacttgctttccagatctagcacattctctttgccgtaagtctcaaccatccgtggctgacgggccacggcagaataaaccactgccagacccaccatgtgagcagaactgacgggcagtccggctgccatgagcggcccggcaatatccatggggagtagcttcgtgatggttgccgctggcgcaactgcattgattgagatatcgaaacgggggagcgtcgaacgcaaagaacgaacgagaccgaccagacccgacttgatagcactatacaccggcaagttctgttcaggcgcgtatccagtcgcactagcagtgatcacaacggagccacccttcccttgttttcgcatgtagctgaccgccagtttggtaaacatgacggtacctttgaaattgacgtctaccaccgcgaatccaggctccttgagttcgccctgctcgtcaaaagtatcctcgaagtatggctgttcttcggagacgccagcgttggccacggcaatgtcgacatggcctgcttgggcaaaagcagctttgagttcagcccaagatgtgatgtcggccttgatgaaagtcgaattttcaggcgcttcgccactgtcgggagggttgcggtcaaacaggaagattttggctccggctcttgcaaagatatttgcagcggcaagcccaataccggaggctccgccgctaatgacgaccactttgccgtcgagccgcgggatgtcttcttctttgatgttgagagatgtcatagtagctcttgggggttgaactgagacgtggtggcaccttaatgtatccaagtggagcagtaaaggtatagatgctggctgccatcggggaatcatggcgttgttccttgactttcatgagttctgtgatggattcgcccaactcgaaatatgcccagataggcaaaaagccggaacaacaagaacctactaaaacgggatagctagcaatcaagtcatttcggtgtgcctcccgttgccggtttaagagacaatccgagcagttgcatgctttgtgaattgtgatgcaaggggatgtcgaagtccggcttcatttcccagtgtgaagagattagaaaaatcacaattttatttccaacgcctttttgtgaaagattcaaattccgttattacatgctgtttagtgtattactctatagtatattattcaacagtttgctgggtgttggatcagggttacggcctataaataatcatcaaattatcaaatcgtgaatatccatgattcaaatggattcttttgatatttttttggtgacactgaggtgctttagaaattctcctagtagatatcctcacaggtgccctgcaaagtcatccgcgtctcttctgcaaactcaaatccctttcaggccttgagacgtctttttaagagcactcgcacacttggatcgggatggtagcctcctggtgtccacaggctgtcaggtcgccctatatctcctttaaacttgaagtcaaagttgtcgatcaaatgtacaagtatcatcttaatctcattcgcggcgaaaaaacgacctgggcacgcatgcacaccatagccaaagtccaagttattcgtcccagtcgccgtaaactggtatttggactcgttacctggaaggtccctaagcttctggaatctgaagccgtcgaactggcttggattttcccataagtcctcatcgttcgaaacttggtgcaaagggaaagctatgtgcattcccggctgcagcacagttccatcatgaagagtgataggttgaacgattttacgccgcatgttcagcagagatatcggactaaggcggtgggactctttgagaaacgagtccaacttgcgcagctttggcatggacgacttattgaggtatggcaatggctcggtcgctctcaggtcctgaagctcgtcacgaagaggctgtaggtactcgggtctggcagccaagtcgaaaattgcgttcgtcactgtcatcgaagtcgtgtgaatggctgccatacttgtcgctagctgcatctgtgcctggatgttgaggctatctcgttccttctggttactgttcttgatgttccatgcacacatattgtgaggcccggttcccatttcaagctgctgtttggtgccagcgatgatgggcgccatcaagcgtctcatggtagccagtgatttgtgcactgctcgaactttggtgttgagataccgtgaggtccaacgaagtagccgcgggtatgcccggatttcaggtacagcgaagaaaacattgagtgtgaactcgatgatgcaatctaggtattcctggttacggctcattggaaggcccacaaaaatccggccagacactaatgcgacgatgcgaacaagcttactttggatgtcaatttcggtccagtctgtgaaaagaagattagtgaatgatgtttcaaggtccagtcaccccgagtcttaccgtcgcaaggtgggatcaattcttggaaggagtacacaacttcttcatgtatatcgcccatcaggtgacctgcaaagctttagccacatcaaagacgctgcagtgtaggttagcttaccgagagtctttgtgagctcgttcttgacactgttcaccacagtcgagatccttccgcccacagacgttgtcgtgaaaaggctgtgttcggacaggaaccgctgcaccattatcagttaccgcactgctcaaccgcgcttgcagacatacctcatcaatctcgtcatctagattgagcatattgtcgggtagagcctttagttcttccatgaacttagtcggcaagatgacggtctcgccatgggcctccttcaaggtgaagtatttacccttgtactgtggagagtgtcaatacagctctcgcgacatggtaggttctcactcacattctgaaatccttccctaattgtcttatccaatgctatgagatcgattggtccggtctcgtcgtaaagctgtggagcggggaattttggcggttgtcgaggtgcaaccagggcatatgcgcaagcgcaggcgaacaaggcgattgctgttccgagcgcatggtattggtagctaagtgtaagtacccgagaaaggtgatccagcatatcgacgttgttctcgagatcgcggattggtcgtcgaacgaggtgtttatcaacatgagtgtgagaatcgagagcagaagaggagaagatcacggccatagacgcacaggaggctcatgaatctactgcaagaaaggctcctagcgtcggagcggaagcatgatgggaaatggacgcgccggttttgttacaaatgcctataaaagatatgggccgagttagtcttcggaattaaccatatacagtgctgctcccgaagatacgagttcacgggcttcataccccgagaggtgcgcatccgtgggcaagtggtttgataaatactcttcaggtgcagtgggatacaaaaattcaaagtcccacgtcacttttcgccaaggtattgttgttctcgctacttgaaggaataaacaaaggctcaaattgaagttatttctagtattttgtataccagcctttcgtttcaattactgtttctactcaatttcccaccatcatagctaatctatagaagtttcccatattaatagcatgctatgcttcttgcgcacctttgattaatcattctaaaaccctttcatattaaattcgatgatggtcgccgggggataactgctgtcgcactactattatgaaaaaaccccccaaaaatatgtatgtaaaagatagacctgtatttgaaagcagcaagaacaacattaccgaattagatctacttcccttgccaaaaagtgacataggactcagactttttgcaccccagtctgggtacttgggaaggtacttgagaagttgattgggtgggtacgatcggaggtatttcaataagctcgtgagagaaagtactatcttttatctgcgatatctagccagtcttgacgtctgtccgcttcttcagcgccagcttgacgtacttgagcggagccaacgtgactgtacccgctgccagatgatcaatctcctgcttcactactttcgcgtccatgccttcgccgagcacaatgcggtacttccccaagactgtcgcaagaacactgatgtactcggactgtgtgaatttccttccgaggcaagcgcgagcgccgccagaaaaggtcatcaacgttcccctgacctgtctcgacttgtcctgtgcgacgaccttcttgttagggcgcgaatttggagtgacccctatggtacccatccatctatcaggcttgagagcccagggatcgggccagtacctttcgtggtagtgaacagcgttgacattgaggtacacgcggcactcagccggcaggacatgctgttgtggggaattgttttccgggtagacggtgatagtggtatccttcgggaccattttcgtgataatgcaaacaccagggtacaggcggaaaacttcgtacataaagccgtatgtgtactggaatttctcgaagtcatccgtgtaattaagcgacgtgcgtccttcagcagctgcctctgcataaaccccatctacctcttgaataatcctgtcctgcaaatcctgcctgagagctaaggtgatgaagccgtaagtcatggcgtttgcggtggtttcataccccgcgagcaggtacagaaaaagattgccgagcacctcgtcttcgctgaaggcttgctttcgaccggcagcctttgcctcaaaggctgaagcacgcagaacggatgtaagaagattcccctttgcgtcggcagattggtattcgctgtctttgctcagcttcgcggtctccgtccggatcatctcacgcatatacttctcgagctcaccatgcgcgatagcgatctccttcattgatgtcatcttcataatccatttaggaatgagaagaatcttgaccatgaacgttgtgactaggtgcagcgcgtgatgcaggctcatcttgtaccccggaggaattttgttgcgaagatcagaaacttcagtttcgaagtctaatcttttgccgaagcccgtgtaggaaatgacggccagagtcaatcggttgatatcaagtgaaaggtcgcgggttgtgttttcctgggaccaggactccatgagcgcgcgtgcttggtcggaagcctcgttccagaccagatcgttagctccgctgccatcgttgaaggggggtgcagtaatgcgaacgtggaagttgtacgctttgccctctgtagttgcaacattcggtccatacggctcaaggacctctggcatgtggagttagcgaacgatgttccatgagaatagcgttaaacttactgtatttatctcttggttttagaaactcatttcgcctgttcatgacatcccagcacatgtcggcgtccgcggtgtagcagatgagaccctcaggcgatacgagaaggaaaacatcaccgagctcctcgtgaaccctgcgtttctcttcccaagcccagtcgagaatcgaaaagcgaatccatcgcggccagccctcgcctctagacagtcttgatgtgaacaagggacgaatgagcggagtcaagagttttccaaggaactcagtctcaagtacgggcacaagagtatacggcaggccggtttttttggcttgacccacgtagtacgccaatttgacaagcttgtaaagtatgaacaataatagggtcgtgcccacaaacgagcccagaggcaactttgaggcgttcatagtgcggagagtagacaaggaagcgaagctctctgaggatggatcaagtcaagcgtgaaagctgacagctggttggtctctctatagaccttcctttgtgcaaaaatgatacagtatggtgggagtttgcccgccggggggagttggtttcgagcttttcggtcgccggcccaggacacccattggaaatgcccgaacaagagctctggatcggcaccgcaggagccaaaaggaccatattgggacgcagatcgattcagtcctggtacgaagtatttactggtaggacggacattgaacacatcaggctgcgtcgcgttcaaacagattacttccgagcttacatagcctagccgcacacgtagttcggcccataccctgattagggaagggaaggttattgactagcgctgacatctgacctagaactttattcggaacttgccatagtagttccctccccgcgcatcgattgtaacttggagatgcagtcagcataggtgagagcttggggtagggtactagagcgaagatcgcccagttccatcgttgcttgcctaagcaccgccccaaggatggaacctcaaacgaaagaccccgaccccctaccgcgtctggtgcacataggcgaaatacagttcaacctgggcgaagtgaccacgggcggagtgacgccgcgaggaactttcattttctgccccataactggcggtgagttgaaatatagaaacacacattggacctggggctgacccaaaggcaggacactttaccaccgtctttccattaccggacggattcggcattcactcagaggcaatcgaaggtctgagggcagaggtgcttccaggtggcggcgattatccgctgatacataacaatgaacttgcggaactgaatgtcagcgtcgtcgccaaaggtctcaacaacgatcatatattccgtatcacctctttcggtatatgcgaatggaacaaactcatattcgatatgatgggccagacagccgccgcacgctcgacggagatgggggaaatcaacgcatggcaggtttttcgtatcaacactgatagcccggagtatgcctggctaaactgggcatgcatcattgggcaggagagactgatttacgaagacagtcgcatggctaagactcacatgaaattgttccagtttctggtaaaatagcgatatagagatactcaaattatcatctccacgacttgtatctaggctactataatcatgttcatgtaactggtgctatgtagatttcaatgatcggatgttaagcattgctcattagcatatagtccgcctttcatatgaccttgctcagacagattctctccaagattgataagaccctcgacatgttctactggaacctcggtcagtagatccacattcacgcactatggtccactcacctactcacacgtctcttcgcagggatctctgattgttgcacaatatccaatcaagaggctgcatgtggagctgcaccgaagcggtatcatggctgcgcgtttccaggcaataatgcctgtatatatacgacaagagctgtgcagagacaaccatagaacagcgagagccatttatcctgtcgagtgaacgggacgggaacttcgagactgtagacggcactgcgcttgggtgccatggttctggaaagacgattgcgctgtgaggctgcctataaattttgttaccgaggagaaaagggctggctctaggggcagtttaaatgtagtgtgagtctcaatttctcttaatatgagcgacttttcacgaagcccaaagtagaaattcgccaggttcccatactcggacggagccgagctgtttcgggatatgcagaacacgtgaatcacgaccgccatcttggagtccatttatcttggaagtctaggaagtacctgtttgcatccgcccatgcctatgttggctttacctcattcctcgaaacatcctgcttgtttatatactaccgcaagacctgatctgcctggcaacataagtactgtgatttgcatctcgtgtattgctgaacaagatgtacgagctacaacaacatcgaaagttcagtgcgttggatgaaatgcttccagcattttattactgctacttactttgctttcctgttagcagcgataacagggcgagcacgtccgagctcttgcaaacctccctatcctcgctggcagaagaacgcccatacctgactggtacagtccgaagggatatggaaagcagtgtgcgcaaaggccatctcatcctcgacataccgaatcccttcgaagaccttcgtatcgtattcaacgatctcacaggtccgaagtcccaatggaaggagacatatcaggatctgaaagacaccggcatgccgccacacaagctggatgcaaacttgttagcacccctgacagccggtattggagagacacggaaagtcatgtcggtgcaagccaactttatccacggcggactattgattgccttttgcttccaccacaatttcgtggacgcatatggggctggacgcattattgcgaggttttcagaccactgcaatgggactgttgacctcaaaaatagcgctgatccagagggggacggtaccgattcgaggggcatagcagacctcctcgacgttgaacttttgaaaaagcagtacaaattcgaggacctggaaagtgacccaaacctctggcgactcaactgcctcgagttcaggggggttaacgattttcggtggcccgatttcatccctgcccttcttccagtgaggaagccaccagtcatctcgagtatgttctcgttcagttcagacgctctggcagaaatcaaagctatggcacaaccgaatcaaagcggagcgtgggtgtcgacaaacgacgcgttggtggcctttctgtggcgacataccatgagagctcgctttccatcatcgagaaccgaaagcgagcccccaaaccgcaagtcaaacgtggtggtggcacttgatggcagaaaagacctttctatatcaccaacctacatcggtaactgtcttttccattgctttacggacctgccgatcaatatggtaggaagtgagagcacccatcttggtgatattgcgatcaaagtcagacagacgatcaccgcggcccgaaacaaaacgttgctgaaagctgtcgtcgggctggctgccactcacccagattgccagacaatcaagtacgccaacgacaatctggggcctgacctgtacgttacctcttggattgatctgccgttctataagcttgaatggggcccacttggtaagaccgagttcttccgcattccagaccgacaatttgaaagtctctgttgcattttgccgccaaaggatggggttgtccagttgattacatcgatggaggaagatcatagcaaacggcttcgaagtgacgcagagtttactagatttgcaacttatagatagccccatagatagccaatccgcagcatggtgtcaggttcaatgcttccctttgtaagtcggttattggctggtcagtcgattgaagcatctattcacacgaatattggaccaaaatgaataaccaatttgctttgagtatgaaatgttcccaaatgtattgacctcgctatgccttgagtgtgctaccgtccacagagtgaaatctgacagtcagggcaggcttgtcccacatgacatggaccttgctttgtccttcccaatccagagactgatccatcagctccatatcatatttccagcaaagtttcgaaaggatcaaatttagctccataagtgcaaaactgtatagactgtcagacgctttttgtaaacagctacggagctgtgccacttactttcgccctaggcatcctcgaggacccaagctgaaaggctgagatgattctttgatatcggtcgacttctcattcagccatctgtttggatcgaatttcatcgggtctttgaacatttggggattgtgcgtcacagtccatgcgctggtatagatctcagtctggcttgcaggttagatagaatgctcatgattgagaagaaactagtaaacacgtacaccttccggtatccattccccatcgattgcgagacctggtgatagtctcgggaaaccctgtgagccagggggatagattctgagcccttcattgataaccgcctgtagatatggcaactgctgtgcagaggtcgcattgattgactcataggtagggaagcggtttctgatttcttcacgcatagctttgtatacctccggagtcttgagtaggtagtacactgtagctgccaagaaagttgcgacagtttcgcctccagcaatgatgagagtggatgcatgagctgtcatctcctcgcgatcaacttcgccggactcaacctttgaaattagattggacatgaagtctttccgaagattcttgttggtcatgcgctcggcaactttgtctctggtgaattgagagtgcttatttcgcaccgcagtcagaacaggtgccaagaatcttgccaatgtcagtgcaaatggcaggcgccgcaaattgtccgcaacggtgataaagtaaagatgtttgagaatcatttcctgccagtagtgaggctcacctcggatgatgcactcgaaagattgcccaaaggccatctctccgagtatgtcaaacgctaccatttctgtccacttagtcatgtccaggccttttgtctcggaaccaccgtcgttgccaagtcgcgtgatgaaagcatcaacggtctgagagacaagtggctcctgctccaaaagggctttcgtcgaaaatgcagcagacagaaatgacttcatctgccggtgcttctctggatctctctcacttccaatgcagagcgagttaaaccccgacccgtacatatcgtagaattcactttttgttggaatcatgccccctggccggtggccgtatattgacttccatgaggacacagaggcaaatgagagctcgtttggagctactctaagaacggggcctttttaaaaaagtcagcagctgcttgcgtccgggcacggatgaacttaccgtatttctggtgcccagcctctatggatcggtggattctgcctttcaaggtcattcgcattcgccatagctaattgagtcagcgagaggaatagattgagtaaattgatatcttaccaaggtcgacctagccaatagtggtcccggaaacctggccaggggatggaaccagaggttaaagactatgaggccaataaaatagcagagggcctagccacttgttagcaaaataaagggcctggtatggtatgaaggatcgaggtgtatggccattggccaatgccaatgagcttactgctgcagagatgacgaatgggagcacgtaaatgctgtgggggggttgatcatagacgaataagagaccggggattggagatatggtcatgttggagtaggaaaatttgagttgcatgaatatgctgcggtaagaattcacttccagatagctcgagttactcttccgaggaaatcgtgtggccacttataaacataagcggcttcacctgttcggactcatgctgttttgggtcacatttgcctttaaaggtctatatccgacatggcgaaaagctgacacaacgacgccctgctaactagatcgccgatctctcttcggcgtaagcactactcccatcccaagggcacctcccgttctgggtaaattatccctgaccaatcacagcatggaacggcaccttcgattcctcacacatctatccatgtacgccttttggtcatagcgttagcggctcttcctggattttgtggatgtttggttttgttttttttgggttatgtcggtcgaagggccggcctggaggcaatgcaggcgtgctccgtgttattatgtcgtattttcgcccgtcgcgcagctgactcgcatatgcaggagtggcgggctgtgcggaccggtgcgaacgtggcgtcccacgagtggtgtagaacctgcttggcagggtagagcatctgcttactagataacgataatagagcgaagaggttagcgtatctggcttgactgtagagcgtgttactacaaagctgattattgggaggaggagatgaagaagaagaggaggagatgaagaagaagatgatgataatgaagaagaagaagagaagtcctttcttcttcttctcttcctcctaagaaggggaggagggtctcttaataccgccctaagtatcttgatttactaaatgtgacttatgcatctcccgcccgaatagcttcataatccctgccctacgtgagacgccacaataacaagtacatgtcagcataacagtctacatactataattcctggaaatttgagataataaagttcaaggcaagtgctcgggtctctacttattcacaaccctctgagaactgagatcacttgctaggccagaatgtttggaactctcaggatcgggtccgagaagaactctgtggaatttatcgagcatgccaaaggagaggctgcaagccgattaggaggatacgtcttctcacattccgcttgtgaaagctgccgattaaaaaaggtaaagctttcccgtactagcatcggttggtttgctaatataactcctctggtcaactagctacgttgcagtggacacaagtctggctgcgatcgctgcagaagccaggcgatgaaatgctcctaccaaataggagccccgagcaacagctcgcgaccgaagtcaagatcacatttccaacccaacttctctaacatgagtgggacagctggcaccagcaaggctccgagccctctgggcaatgatggcgtcgatcgggagatcggcgggtgggaaatggctgagaccgatccgactggcagtgtagtgaccactaccgcccaattcttgaatagcgtgaaccagggcgaacactcgaatcttaacgacttgcgtcagggacaaagattcggcggtgagcttgactattccgaaaacgaacttaatgatattttcagcaacatcgcctatctccagccagacgatatggagacgaacgttttcgtgggtgccgcaaatcgagctgtcctcgatgccgaggcctttgactcgatgaccgagccagcaaattctatgtcggacgacataggcgacatcgcggcatctcaacctccatctgccgatgttcagtcggcgttcatggctttcgatcatgcacgcacctcgtcttcctcgtcgtcacaccaaagctccgatacctcggctagtgacgcttttatcgcaacagatttcgacggagccagatcgaggacagatccatcaacttgccaatgtcgaggatccatcctccgcgttcttgctgagattgagtcgaacattttatccgccagtcccagcaacatgtacgctattttgtcatatctccgtcagacaacggcagcaagcaacgacatcttgacatgtcgcatctgcaactgcagattaaagttcttcggacttcttgggatcattggcgagaagatcaccagcctctcgggggcaataatcaccgcattcgtctgccgcctgaaggagcaaaatgagtctgtggatttcggcaagtccgattctcctgacaagcgtcttgatcccaacagggcaatacaattgtgcgagtttcaagtccagtctctgcaggaattcaaagtcgtatcagctgccgttattaagttgcagttgaagtattctgtggcctttgtctctcgcactcgtgagcttgcgatatccatgaatcatcttgcacaagctcagagccttgagaagcttgaaagcaggctgaacgagctcgtcatcaagatgcaacgaatggtctcggaagtagactcagacctttgtgatatatgaggcatctggggttgttgcaggagcctgggaggattgcaggctacagtggatgcctacagagcttacggagccttcagggcctatatgtaccgaatacctgtccattgtagagcttagatagtcagtcaatatttgcagttaattcagtcagtcattgcgagcataaagagatcactggtcatgccatcagatacctgaaacacagataatgagtgaaactgacggacaactgggtttacaaagataacacgtatccagaaattatgaaaagagtccgttacttctgtatctgcgaggcacctttccgtatccggtatctccccgacttctttacgaccgacacgctcgagaagggcatgttccgacataaggctgctcgaggccatcaattttatttgtcatcctcatggggcctagtaaaataacctggagtgcagcgcctggtaaaagcagtcgaccacaacccaaagatttccccaattccagagtacctacctagcacttctttgcatacccgcagtcatggatgcactcgaggctccagagctgcttttactaccccacctgtcggccttgacacccaagactggttttctgattggagtgagtacccagcattcgtcactcgcaaggcagttctgaaataaaatacagcttgctctcgctatcaccgcatactgctactatagacacacacaacatccactgtacaagttcccaggaccccgatcggccgcatggagcaacgtgctctactgttactactacatccaaggtcgacagcccttcaagttgctggagctgcacaaccaatatggaagcgttgttcggacggctccaaacgatctctcctttaacacggcaggtgcatttcgagatatttacaacttccggccgggccatgagacttttatcaagagcgactggtatgatgggggcgtctttgcagacaaagctcattcgatcgtgagcgagcgtgaacctggcaagcatgggcacatgcggaagtatctcagccacgccttttcggacaaatcgttgaaagcgcaagagccactcatcgatgaagttgtaaacgagtttgtctctcagcttgacgtgtttggttcgaaaaagggtggcatcgacattgttgtctggtttaatttagccacttttgatatcattggctccttggcatttggagagtcttttgggggcgtcaaatcaggtcagtgctccagacctcatacatcgcatctatactcatcattcacataggtgaggttcatccttggatttcgcgaatcatcacggcgatcgggcagagtgctttggcagatgccttcaagcggtttccaaaattcgcgaccacattcaagtggttattcccgaaagcaattgagaagatgctggaagacacggcaggccatgagaactataccatctcactgattgataagtatgcctccgaagcttcacagggctatccgtggaactctaacaccttgatttaggaggttgagcaatccatctactcgcccagacttcttgacgcgcatgctggaaaacagaccagaagatttgacagatgtccagatcgcggcccatgcgtctgactttgtcattgctggcagcgaaacgacagcgacaacattgagctgcatcgtatactatttgaccaagaacccatcagtatatcagaaagccacgcaggaaatccgagacaggttcgaaagattcgaggacatcaactcaacagcagcttcgcaactcaaatatcttcatgcattagctctcgaggcgatgcgaatctatccacctttgccgctggccttaccgcgagtcgttcccaaaggcggagataccatcgacggtcacttcgttgcagaaggggtaactacagatccatatccatttggtttgaaccttcctaattcaaaacagacaatcgtttccgtcaatcctgtagcagcttgtctatctacaaagaactttgatgcgccactggagttcagaccagagcggtggctcgaaagtgatttggtcgatgatcacgaggcctcgcagcctttctcgatgggacctcgagcatgcctcggaaggaatttggcatggatcgagttgagtctgttactctcgaaaatgctttgggtctacgatatcgagcttttaaacacagaagtcgattggttaagggattccagaatggcgatgctgtggaagaagccaaagctaatgatcaagactactcgtaggcgagttgcttcatgataataacaagattttcggacgccctaggacgtcctctaatatctgaacgatgctatacttagacatgaatatattaatgtaatagatagacatgctacaattggcttacaattcttagctgactagcgggaaggctatattaggccttgacaacttacaaacaagggaagttctgtagtattcaaacccattctctggatctgcggtgaatctaagggaaggtcagccttatatatatatgggaaggaattgccacctcagatgcagctaaactcactttagccaaagatttacagttccataatgtgaagtgttggtctgaggaagtcttttatctttctcctgaattgagtcctcctgtctatgggctctaggaatatagctattcctttcccgctgtaaacggcgtttcgtctcggcaatcttattgcgctgagcaaaaaagtcctttctgcctataattacgtgtggcgcgggtggaggcagggaatttatttaaagtaaaagaacgcgatattagatcaaggtaccaagtaaaaggtttttgaatagaaggtgtgtgaatgattatatactattgttagcacacattctacatttatatctgagattttgagctcaagccgctcttaattagaagataaaaggagataacatcctgaaacggatggagttcttcgctatttcctgcgcccctccgtcatgatgtattttcttgatgagataaagtgctccggaaaatgagggcagcagcaatgctatcagcgaactaaccatcacagtataaacgaccctgtgggggctaatcccttctgggtatagtctgaggtgggcatcagtgttgctcactgattggacactgagcactcactgagcatcagtcatcctgcacgtgactgatctgagcccgtgctgacatctacccagtgagcctgagcctgagccctcacaaaagcggcagctcaaataggaaagccccacccgccagggtatttccggtacgtatagctacatatatgaatttttgttcagtcgcttcacattctgtggtcaggaagcggcctcttctgtcattggccataccgggtgtctatcccagtcactcacctactgtaaaacatgcggatagggacgggtactgtaatttaagctggatgtatcgtgttggcttagaattgtcattttcattctgttttgaatggccatattccctgagaagtccgtggcactaggtatataattacgaacctttgggaaagtccgtcaaggaactaatcgcccgccattcctcaatcgctgccaaggtctcagatgcggccttgctgatctcatcgcaggcatcactccccaagggcaagagagcaggcaggggtttcccctcggcgattcccgtggaggtaatgacgtcgtagataacttgcgtgcccttcacggggttacccagctgggcgccgttaaaggcggcgaagttagagtcggtggtattgtttacctcctggtaggccgatagacgcgaggactttgcggtctgagaaatattggctgacgggttcagtaactcggtgcggaagaagcccggttcgactaaacagtggcggataccgaacggggagatctcacccgccagcccaagtccaatccagcgcagagcggctttggaagcgttgtagagattgcagccaggcatagggtaccaggcggccatagagccgatggtaaccaaagtgcccgaccccttagcgcggaggtgtggcagtagggcgcggtaaaggttcagagggccaaaggtattagcctggaactgacgctgagtctcttctgcggtagcctcttcaagcatgcctgtctgcacgtaggcggcattgttgacaacaatgtcgaccgttccatagacagctaggatagtctcgactgctgcttggatctgggctgggggctcgttgtggtctaggtagacagccttgatattagggttagttgactcgagctcggctaatttatgcggagtccgtgtggcggccaacacgcgatccccgtgcttagcggccactttagccaactcttggccaagtccggacgaggtgccggtgatgagccagatccgggaggtagtagccatgatggatgggtagatgatttgttctcaaaggatggtattgaggtcaggaggggtgtgctgctgggaggaggggaggaggacatctatatatcatatgggccgatgccatccggtgcgagtactaaactccgctaactgcgaaacaaagatactggctccatcctaaactccggtaactacgaagcaaaaagagacttcttacatcctagtcaagttaacgtagcctgataggtaaaacgatgaaacgaagtgggttcgacaaaagtccatcagtcgatgctagaataagaggaaggtcgtccgagactattgcactaaccggaatcctgctggccccatagtagtagttatggcaactgggccaagacctacatattatacagtgtttgttgtatagtatcggagcgaaggatgcatgtctatcggctagtattcaaaccggcaaactagattagacagtatcaacgtgagagctcatcttaaagacaggcagtgctgtttcccggataccgtgaggacagtcaccgaaaaacaaaattatgatttctactgtttggttagagcgtcctgctcctctgcttaggaacagtaagcgcaggtacgttgatgagcgcccatccgtagatcgactctagtaaccaagtggcccgagcgccagcggggagagctccgaaccacaacgtccttccacccgtctcaattaatggcgagccgagatggcgctgacatcagtaagatgccgaaatttcatactgatggatcacagctgacagaagcaacagtggaaagcattcaacttcatcgacgtgtcgccggtgaagctaccagaggacagctcctcaatcttcgatgtaaggcctcgaccttcctctgctctagcccacggcgtatctaactgtcacccctagagcgacctctcgagtatctgcactggctccgcgaacctctttgttggcactaccgatggatttgtccacatcctctcctcggccttccgcgtcgtgcgatcgttcaaggctcacgataccggttccattacgcacatgcgacagataaacgataccgctctgctagtgaccgtcgcggaggatctttccaacgagccggttctgaaggtctgggctctagatacggagaaaaaagatggaggcccgcggtgtctgtcaacggtctctgtacaaaatgccaggaggcagttcccggtatgtttggcatccgaagcgggaataaaatggtcaatacttacttataatggtatagatatcggctttcgcagccgtcgacgacctctcacaggtagcagtgggtttcgcgaacggatcggtgacgatcatccgaggcgatttaatccacgaccgaggcgcgcgacaacggatcgtattcgaatccgaggaaccgattaccggactcgaaacccaaatcggcgccgtcacaaccctttacatttcaacaacgagtcgcatcttgacattggtcatcgccgggcgagggcagggccagcctgcgcgcgttttggaagatacgggctgtggcttgggctgcatgactctggataaagagggcggagatgttctaattgcccgggatgaggcgatctttacctacggtccgcgaggtcgtggtgcgagctatgcgttcgagggcccgaagacatctattgatgcttttcgtgactatgtggcgctcgtctgtccgcccaaggctgggactagcaagtccgatccgctaaggaaatacggtgctagtcccgccgaggaaatttttggcacgactacgttcacgcttctcgataccgacctcaagttcatcgcgcatagcgaagcgctggcgtcacctatgaaacgtattttcatggaatggggtgacttgtttcttcttacgacagatggaaaggtatgtgattgatatgatcttgtgttcgtctttcttctaaccggttctagatcttccgttatagggagaagaccctccagcaaaagctcgaaatcttatatgagcgcaatctctacatccttgctattaatcttgcgcaaaagattgggattgatccgctccaacagaatgctatctaccgcaagtatggtgactttttgtaccagcggggcgactatgataccgctatgcagcagtatctccgggccattgataatacagaaccttctcaggtcattcgcaaagtcagtgagaattgggattcggcattgttctcgtactaactttgatgtagtacctggacactcaacgtattcacaacttgatcgagtatcttgaagagctacacgaccatggccgtgccacggttgatcacacaacgcttcttttgaactgctacgcaaaactcaaagacacaagcaagctagactcgtttatcaaagctcctggtgagctgaagtttgatcttgaaactgccattgcaatgtgccgtcaaggcggatactatgagcaagcagcctaccttgcaacaaaacatggcgagaacgacatggtcgttgatattctaatcgaagattctaagaagtacgctgaggcagtggaatacatttggcggttggatgctgaagtggtatgtctaaactgcgtctgcgtcatcgggggaaacaagctaatatgtgctaggcctatcacaatttgatgaagtacgctcgagtattgctaacacattgccccgagcggacagcggagctgttcaaggtttactattctggccagtaccgaccacgcacggaggtagaacagacaccagagccccaagaacagacgaccagcacagtgcaaagtcttgctgcccttcttcctttgcggtatatgactgttggcacacaacctacgcctgaaatccctgagccagcggcaaatgaagacaaggttgagaattcgacgccagattatcacattcccaagccccggacagccttctctgcatttgtggatcatcctaaagagttcatcgatttcctcgagaccttggtgcagcagccggacttgaagaaggacgccaaggttgatcttttcacaacactgtttgagatgtacctggacacagcaaaggggaaaaaggatgcaggcgaaagacaggaatgggagacaaaagccaagaaactaattgaagggaaagacgtaagctgtcccatcgcccattcatcgccttatatctaacccacctagattccgatctccacatccaacgtgcttctcctctccgatctgtcaaatttcaaggaaggatctacccttgttcgcgagcaagaaggtctccgcctggacattttccgttccttcacttcagcaaaggatacacagggcgccatcaaagcgctacgccggtacgggcccgacgagccccaactctacgtcgacgcattgacatacttcgcctcgagcccgaagatcctcgaagaagcaggcgacgagctagacacagtcctgcagcgcatcaaccaagacggcctcctctcaccattgcaagtgatccaagcgctcagcaacaacgcagtagtaacaatgggccgcgtgaagaagtacctcagcgacaacatcgaccgcgaacgcaaagaaatcaccaccgtaagctccttcaacaagcccctcctgttcagcgaatagtaaagctaacccccatcctttctagaaccgccggctcatcacaagctataaatccgaaaccgcaaccaaacagcaagaactagacaacctagccacccagccagtagtcttccaatctcgccgttgccaatcctgcggcggaaccctcgacctcccaacagtccactttctctgcagacactccttccatgagcgctgtctgaacaacctcgacgacaatgcgcagtgtcccgtctgcgcaccgaagaatgcgactctgcgcgcgatccgccaacggcaggttgattccgcggaccagcatgatttgttcaagggagagctgtctcgctcacgggatcgattcggggttgttagtgagttcttcgggaggggtataatgaggccgcagagtactatggagtaggatgggtggaatggattgcactttgtttagatacgcttgttctcattcttttcatgggcgtgttttatatggagctggttttcttcttttgatacctcgatctttgtcatttagatcaagttgtttctcctactggtgaaggtagtagatagtagatagaaataagcagttctttacacatgcaggtctttacgatagaacaactacttggaacaaagtactttggaggcaaaaactaggactatggattatgtccatgtaaagaaatcattgttcagttaaactcgcttcgctctagcaagtaacaacagcgagctaaggacaaaaaaggaattatatgaactcgataaaatgagcaagtcgatcacggtgatcaagcaaggtcattagatgcaaagagcaattaatatgcacagctgatgagataagaaaatacatgaatactgtcgaggcaaaagggtcgaagcaatagaaactgggtagatacatttccattattcactcgagtcggcaggagtgcgacaatgtctcctttgtatggccgaggacgacatattagagacgaaggataggatagacaagccaagtcgagattcttctatccgattgactcgttagagatcgatctcgcttaaagctcgcgtcccttctcgcctccccatgaaatacgcgggatgtgtcgggaggtagattgggagttggagccggatccagatccagatccagatccagaggactgttcagatggcttgtgtgtttcgccgggctggttgtttttcgtattctggcttgattggccagtctcgttctcttcaatgtctgagtcttcctccacgatggcattatcatccgaatctgagccatcgccattctcggactcctcaccttccacacctaaggcgtccagacggcgacgacgctcggctggggtctcgcctgtgtcgtcgtcagcctggcgtgggggcgcagtgagaccagcggcttgacggagacgcgaaggtgggatacgctctgtaccatcgtcgtcggaatctcggcgaggccggtcccgtatacggggtggcgcagggctgaagttgttgcggcgttcttgggcggcggaggtaccaacgccacgcgagaacctcgccagtgaggcggccacgttaggggaaccatgatggttgctagactcgtcgtcactaacgtcgctatcgctgatggactcggaatccatagcttcagtgtcttcttcggggatggtgttagcggcagggtggcgctcttgctttccctgggccttggcttcttccttggcttcgtgctgggccctttcttgaactggtgctggtgcgtcggtttgctgaaccagatcccggcgggccttggcgtcaagacccttcatctgctcgaagaattcctgcttgttcatacgtcggcccttgtggccaatgccttgagcgtcgacttgcggatcctgggccaacgtgaatcgaatgccgtcgtcggcggtccaatcgttatctttattcttttcgtggccagcctgggaagattcgccttcttcttccatgccgagccaggtccccatgcggttcaaaccacgtcgaacaggagcctctccagggacggtggtctccttctgggtcttctcacccttttcacccttcttgccgccaggaagggtatatttcttgatcacctcaccgtcctcatcctcaacaataatagtgttgccgaattggtatgcatgagctgaacgaggtttgggcttttctttcttttcggtctctgccttctcctcttccgtggctcgaccctttccaagtccggtccacttggtccacttcttgagagcgtttccatatgacctaccaaccttctcctcgagctcatctccctcggtctttgtgtggggttgactctccgatgctgcaaattctcctgatttatctttttccagacgcttgcgttgcccttcaatgtggccagtcttctcttccggagacatatgagaggtatcctcagtcgagagaacattgccctcttcatcctcaatgaccatgtcgtggccctcttgataaacctctatctccggttcacgaccgaatcgatcgcgctcggcacgaggtggagaagctccacgctcagcctgatcgcgctgatcaagttcttgcttttcttcggcctcggcctcggcttcgtcctcggcgcgccgagaagcgggcataatagcagactggctaattgggcctccgccaccagcggcacgcttacggcgacgtctccgcaggggcttgcgacgagaagactcgaggttttgtgactcactatctccctcttcgtcacgttgccggcggaggaagttgccaggcatgccgatggggggcaaggtaccgggaggatactcaggaagcttttcgtccgatgaggcatccgtatcatccgtcttacggaaggacatggagcccttggcgattgactgcacacgaggaagacggttcatccatgaaggtccctcctcgttggcctgtgtgtaggatagggtgatagtcaaggtgttgatacgtttacccagagtgaaaactgcaatagacgaaccatgtactagaatagatgtgatgaccatgaatgtagtgatgggccagataagcctgacaacatagtaattgctggttcctggtattgggagctcgtcttcaggcgatggttgtgtgttgtcgttctccagctccgctcgagcgaggatggcggcgaaaatggcaccgacaccgataggaccgaaatgccctgcgaataaagcttctcgccaagttttgacgtccggtattattggcttgagcattagcataatgggaatacgtcggaagaagaggaccaatatcgcaatcaccaccagccgccaaggagtaaggccgagctcgggggagttgtagtcctcccagggaatgatggatccgaaatagacaaagtatgccaagttgagcagaagatcgataacgttggagacatgagattcctctgtcttctccgtaaaccaaccatcgttactgaatccaacaccacaagcgaatccgatcagcaggtcgtccatgcccagcaaagaaccagaaccagcacagaatacagccaacacaaagtagaatactaggaaactctcacgatcgatcaatcccttgcgctcagccaacttgatcgcatggcgagcaaaatagccgatggcgaagccgaaaatagcacccaagatacactcgtacaaaacggtgatacagaaccagtttagccacacctcgccgacttgaggacggaagtgatagatgtagaatgataggtagatgaatgggaaagccataccatcgttacacccggactccgcagataacaagtcacgcaaatgcttggggacacgcttggcgaactttcccttaccaacgactgacgacgccaagacaggatcggtagccgtgacacaggcagcacacaccagagactccagccagttcaggggaggcaccatccaccagataaacagactggtcattaaccaaccccacgtcatgacggggatcagcagcaaggtaaccgacttccaatggcgttccatgtaggcctttggcaactcaacgccgacggcgaaacattgcacgaccaggacaattcgcgagcactcgagagtgattttgtcgacgtttccccatttatgcggattgaacaaatcggccgcatgggggccgaaaatgataccacagagcgtggctacggtggcttcaccgatgtacagcttctccttgacgaacaaggagcacagcatgaacagggctgtgaaacctcccaggatcatgtaagccacatgcggcttatcgatgtccagatgatcccacgccatggtgaggatgtcggtgattgaacaccaattgtattatatccgggaacttttgtaatattccgtccgcttcgtaccgcaacgagcaaatttaccggatgatttccgccctcgaacttcgttggtctgcgtagctcttcatgccttggtgaatcagtgattgaacagccaagttgccgagccttgtagggctgaatgaggtaaggcgattcaagagcacgtccgatcggtttcgcggtgggtgacggtgcagattgtggggggtgcagactgtggccaagatcgtggggatgtcactggggcggaggcgaagctagataagaggttggagaaaaaaagaacccaggcttggcctcagggaagtcaggcacaggaagggggagaagaggagagagaaaagatttttctagacaggagcgaaattcggtaagagtcttgggagctcttggccaagcagaagaaagcgagtcaacgcgcgcttcgggagatttgcccagaaggaagtattcttggaaatggcgggattcgtcagccgagacattcaagacccacgttagaagcggaattggtcttggcttagcggaggactgaacgtgcaatagactaggatgtctataagggaatgaggaaaggtcctgattctctggagatatcggagaagaatagaaggagaagatcagataataatccgctgcatacggcatgtgtctctgatttcaccggaacagttgcaggcagtgtaagattcgggttctgtacggtaatggtattgtaacattaagatcggccagccctgtcaagtgccaagaccgaaactgggtcggtggcgtttctagcttgtgcgcagtgtatggatatggatagtctagtggggctcggggcacatttatgatatcggtctggagtggatactggtatggtatggtatatacagtacacttagtaaaataacttaccgataatccatatctgctatgaagtatggaatgtaggactgcccgtgtagagttagtatacagagtacatagtcaatatagtacacatatcttggaatattgaacagaagacaatcaaattgggaattgtgagtaaaataaggcaaatcaaacagttcaaggattgcaaactttcaggggaatttgatgccgagaacccaacatcgtaaaacacgcgcaaggattatttccggggaaatatggggagaaaaaaaaaagaaaaaaagcaaagattgcatcagtgggatgcagtatgcacaccgtgcactctgcgcgtaccccaaataagacagttgccagtccacccgcgggctgttatgtacgatgggctgtacgagtacgacctgtaaccacgcccaatgctgccctagctcgtcggcatcctctcaacttcgtcactcaagccacgccaattgtccgcctgcagttcggcgtacttgacacgctcctggctccagtcctgatgcagccggctgatgtgatactggcttcgctggaagtgaacgagttcgtcgcggatgcattctgtgatgaagacgccccgagcatgctgttgcacaatggattctttgtcctagtagacaatcaaggttagtattactgtaagtgccattgaaacatgagtctcaccttgaatatagagtcttcaaccttctcgatctcccctggtttgacggtgcccgagggtcgggcacgtagatcctgcagcttctgctcactagtctcaatgcgccgttccagctgcgcaatattgttccgtgcataccgatcccgccgatcgaacatttcacggacactgaccaagcaatcgcgttgctgctttagatcttctagaaccccctcgctccatcctcgagcttcgtcctccagcagactttggctggcagagagatgtcgagcggtcgctgtgatgcctgcattaagggccggaatgtcattggtatccactgcgtatgtgtctctggtgacttccgtcaaggactgcagggcgagtgagaaccggaggtggtcagcagccagaccatcatttcgcttagccaatcgctcaagtaaagtgcaaagactaatatagatttccgcagagcgcttgacaccactgcgaacggtttcgaacgtttcgttgagagtggcgggtaatgagtcctcgagatccggtgggaggacacggccaacaaattcgtcttggactgatattgtggcttgttttcgccacaccgaaagttcctggtttcacagttattgtctgtctcccaacaacccaaaaggtagcttactgttggaacggtcaaaaacatgatcacaagctgctcctgaccaagaacgggatggcgaacgagggcgttggtgaatcgaacaagtccgtgacggcgcttttcgaggaaagaggatgaatccgctgaaaggtgagtgccattgacttcataattgtgagtaagcgatgaggtgcgctaaactagcgttttgcatacctgaaacccgcttggggggaagaagaggcaattgccggaaaggaaatcgcttttggaggcagtccaatagccaaacaaaatcgctgtaacgccgaataaccgtgctacctctccgggcagacttaacctcataatttcggtgttgaaacataaacaagccttctttctcggggagcaacgtgacagttacggtctcctctacctgtgggtttgtcgaccggccgataccaagagaccgacgtcgtggtgtgatgtggcggggctcatcctctggaccaaaaccaccgagtgctggaggcaccgtgcccccaaagctgctttcatcgctcggacccgctccgctgaagtgattgttatcccatccagacccaagactgctaggctgtacagcctcggtctgaccattggaatgctcccgctgaaccacgttgctttgtgtggtgtcttcaatcgccttgctagtccacgcgttcgtagtggacctcacactgccgaatccattcgatacacgtggttcgatgcctccgcctgtctcatggccgtggccgtggtgcaattctggactgccccatggatctgactccaatccgcctaatgacgctcgtcgtaataacctttgcgattgtgcggagccgggggtttgcaagggagaggaatggtacgagggagtagcaggtcgctggtatggttgttcagagttcgcgtcgccagtctttcgtagtcggtcgaggtagccagcctttggctggggtagttctgcattaactctgcgttagagggattatcccgaataataaataaaaatatcaaagggcgcaaagtcaactcacttttgcggcgatcgtccactgcatcaaaggagagttcctcgccttcttgcgctaggcccaccatcgccaatagcacattgaactcgccacgaccgagtccattaaagctttcatgatcaccagaagcaacaaagttcaagattttgctttgatcagttgcagtgagcccgctgcttgagagaatctcccgcacagaggtcaacccaatgccagagccaaccctgtccccgctattcagaatcaagtcgtatgcgtctatatagctctcaggtacgtccgtattgggaagcaatgtccgagccagatcgcgccgggcagttcttttggcgatattgttttgggcattccaaggagaggagctgtcgtcgccgtcgtcatcggcgaacagcgaagagccgcccgtagccggctcgtcagcaaacagcgaggacttggacctcgcaggatcacccgcagagggatcctctggagatgtgccgaataaggacatcaggaaaccgacggggtggtggttgcgccaggagtgctgtcggggtcaggtgtggaggtgagggcgatgacgatattggcgatcaagcggagctcccgaggggggctggtcgcacgaatatacaagccactttcgacctcaaaaagaaaatcagtcctggagacactgcgattctcaaaaagctgagacgaaaagcgaattcagtgacgattcaagtccaacgaggtgagagagataacgggccccaatgtcactagtaccgtgcccaaccgagttagtcaggtcaggcgagttgtaccagctacaacccactacatacattgtgaaagttgaatttgggaagatattactttttccttcattctggtcctttgagattcgtctcattcaaatcaattaacgtcttgtaatatattctaaggcattggcgttatcggagatcaacatcgtgagagtaagggatgtctctcttgaacttgcacgtttcaacatcagtctatgaactttcgaattcaatcgttcaaggaggtcaatcaaaagagagaatcaggtctctatgacattgtggagctcgcagagaatgccgatacttctataccccgaagatatgatttgatttgcgtctcttatcgaacgaacatccaacatcggatggctgctccgatattggagcttcattgcaagaccccgtcactgctgtacagctccccactcggaagacccccccgatggctagtataccgaggcaatgtatgaatatcatatttaacagcttatctgccggggtgttgacaaattgatcttgctctaactaactaacattggccgaaacctgtgttcctctgttctcattccaacataatatgcgtcctgttactattactcgaggagcgaggctgaattgtctcaagcctcgcactctagatagatattcaaggcgatacttgaccatgctgaaccctcccaaattcgagaatgaaaagatggtgagcaatatcaaagtacataattgaactttgactgacacaaatcagctcaactacgccaaaggttctccagaaagagccgagttgaccaagacaatcaagaaactcaagggacaattcccgttcacaattcctatcactatcaatggctcagaggtatgttaaaaatcacggataccaacttgggacatgtaactcacgtatactagatcactactaaggaatcccgctcccaaccaaacccctcaaagcacagcgaaattgtcgcgaactacgcctctgctgccccagagcaggtcaacgcttccatcgatgcagccctcaacgcaaagcccgcatgggaagctacccccttcgaagatcgtgccgccatctttcttcgagcctccgagctcatcaccggcaaatatcgctcagaaatggtcgcagccacaatgcttggccaaggaaaaaacatatggcaagcagagatcgacgccgctgccgagacggccgatttcttccgccactatatccaagaggcatgggcgttgtactcccagcaacctagggtccaactcgatggaaactggaacaagatggagtatcgcccgctcgagggtttcacatacgccatttctccatttaacttcactgcactcggagcaacgcttattggacctgctgcattacttggaaatgtcgttatctggaagccttcggactcggcgcttcatgctagctggttgcttcatcaaattttgcttgaggccggtcttcctaaggatgttattcagtttttgcccggtgatgccgagcaaatcaccaacactatcctcaagagacctgagtttggtgccctaacatttattggagccactgctacgtttaagggtatacagaagaagatcggcgatggcattggtgccggtatctacaactcctatcctcgagtggtcggcgagaccggtggcaagaactggggcgtcgtccatccatctgcagatgtgagaagcgcggctttgaatacaattcgagcagcatttgaataccagggccaaaagtgttctgccaactcgcgtgtttacgttgcagagtctgtctggcccgagttccaaaaggtcctggcagaagagaccgcagctctcaaggtgggggatgtcgaagactatagtaatttcattaatccggttattcacgagcgttcatttgacaaactcaacaagttcatcgaggatgcaaagagcgactcggagctggaccttatcgttggcggaaaggcatctaaaacagagggctattacgtccatcctaccgtctatcgcacctccaacccccaccacaagattttgtccgaggagctgtttggacccattcttggcgtctatgtttacccagatgctgaatgggagcaaaccttgaagctggttgatacaacatctcgctatgcattgactgggagcatcttcgccaaggacccctatgtcagccggcaagcgcagactattctcaaacacgcggctggcatgctctatttgaatacaaagtgcaccggttctactgtggctcagcagccgtttggtggtagccgggactcgggtacaaatgacaagactggcactatggcacatctgcagcggttcgtgagcgctcgcacaatcaaggaagagtttgtgcctctcgaaaaagtcacatatccttcgaatgaggtttaaggagggaaaatttagatataatctatgacttcgaacgatataaattgaacttctgcatatctctacgctgtcttgaacatatatgttggcaataattcgacgctgatgcaacaacaataacaatacttcaatgtctttcgatattctttcgatatattttacgtatcattttacccccgtatgtaggtgagagtgaacatattccgatactaccgatgggactttcaaggtgaggtccggggctggaaagcgacttctgagaatcatcagatagcactgagttaacatcggaacgacatcaccgaagcaaattataaatgtacgcctgataacactgaaggtcaaatagtgcataatgaccatcactggccaaccccacttaggcacgtctatctatgaaacgtaacgcaaactaaaatacaacctcgaaccgggccggtgctggaacttgagcaataagactcacggagctgcctttctaccctatttacgatagcacaaatccccgcagaggcaacgatgagttggcatcgcgggacaggattccttgtccgggaacccctccttccatcggaggatgactccgatgcattaccggctgactatcagtgaccggatagttggttagatagtagcggtctgataaagtaatacagagatataagaagtggttgcttcaaaagtactctgcggtaccgacctagcttgaacggaagttattgctggcctgaactctttcatacaagacacaagcgcggcgctagactcacctgtctgcgttcttgactataaccaagatgttatctcgctctactcttataaaacctcctcatggtttatcggtccaagtctcaccgaacttagctcgtcgacttcattcgacaaaatctcacttccatgatgccgccatgccagcaatcaaaccgcccgtcgaagtctcatctatggcccgaatcccaacgaaactcttgctacggtctttgcttttgacttccttgatgacatccaagttattcttacaacctgccctagccgtgatgggcgtccttacgacatcgaaatcaccactattgaacccagatcagaacctccttctgaacaagtttcttcgctggacggtttataaccacttttgtgctggagtgaacagaaaggaagtctcgaagactgtggcagatatcaagaagatgggatatcaaggtgtcatattgggatattcgaaagagatagtgctggatcatgaggaaaagctctcgaccgacgaatatgggaaatcacaatacagcgacaagtgctatcagatgattgacgagtggaaggagggaacattggagacactgcgtatggttggtccaggtgacttccttgccgtgaagtaagtgtgaagccctagattcttgtcctatgggatctgatattcctttgctaggttgacaggtgccggtcctatttcagtgaacgcaatggcagcgcaaaagcctatgccagaggctatggtcaaagccgtggatgagatttgcattgcgacagaaaagcagggctcacgtctctggttggatgcagagcaacaagtcttgcaaaagggtcttgacgactgggcgattgaagtgatgcggaaacataacaaatcgcaaacaccaattatttataatactattcagggctacctcaagggatcaaaggtgaaccttgaccatcatcttaccttggctgcacaagagggctggactctgggtatcaagttggttcgaggggcatatattgagcatgaaacacgctctctcatccatgatacccaggttgatacagaccggtcctacgatctcattgcagacaccatgctttgccagagaatgcctgctggcaaggagaacctcccattccctaaggctgctcttttccttgccacacacaacgccgctagtgcaaccaaagcgattgccacgcaccaagataggcttctcgccaataaacctacagtcatgctggaatgtggacaaatccaaggcatggccgacgagctcagttgtgaacttgtgcaaaactacgaacgtgctctcgaacaatcatctgctgccaacttgactgcgccaaaagctttcaagtgcatgacttggggctcagtgtctgagtgtatgggatatctccatcggcgagcaatcgagaatcgcggggcagtggaacgaacgcagcacatggtgaccgcattgcgtcgtgagttgtggcgaaggatcgtcggatgagtcccgaagacattttagtggctaggtacttaatgcacaagatagcgaatcagactattgttactcaatatatccatgcgcagttcatgcacgaagccgaatagatcaaggcgaagtcaatcctgttagggtctcaccaatcatgtgatgggtcatgatagacggtgcgctgttatctccgataagtaaagtcggaagcgcatcccgacagattgaaccaactatctcgttcctaccccgcagcctgcaacaattgatatcggacagtcgccccggaagcatagactatcttcatacctattctatacagcatctcggcgtcctaatccggtatgcctataacacctagccaggcaagaacaaaaaagtgccagagggcgtaagtcatcttgatcaattggccccaaaatagaatacctaactcacattttataacaaagctgtgagcgatgtcgatcaatgaaggtcaaatgctcaggggtcagcccttgcacaagatgtgcgcggaagaagaagcattgtcactttccggtggaggaggcccgggtctccgtgtcggaacggtaagtagcgccaactagctgcactatacgtgctaatatagaactaggtacttgcgagagctagaggagcacatatccagaagcggaagctcggggcgacatggactcccggcaactcttgaacacagtctagggggtacactgtttacaggcgatgataatgttgatgttcctccgacccctcaagcatccagcacactgctagacaatcaagcagatattggatggcgttcaatgtcaatcggtatgctgtagccattctttcaatatgtgtctggtgtgttgatcatgggtcgttttcagggatggggccgtccctgcataccccagggacccctcaaagagatcatgagaccgacagtgaacaagacaatcaacgatcaaggttctctcgaaatcctttagtggaccgggatccatcgtttgcccaaacaccagatggccgattttgtgagtgttgagtctctcgtctcgctctctagctccttactgactgggatatcgaagggtatatggggccgacatcatcgtggtccttttgtcgtcgtgtccttgctttgataggaagaaaggtgccagaatcaaactgtccaccagatccatttcacattgatggtgtggctttcaggttgacctggcgaccatatcctcccgatgaagtacctgatgtcactaatctgccaccgttggactatgcactcttcttattcaacacagtcaagttctatttcggctttctttcttttatgattgatgaacatgcttatttgcaggatctccatgaattctaccgggacccaccagcgaaagctgcttcgaacagaccttggtactgtcaatacttacttgttcttgcattcggaaaagcattcttgacgcagaagaattcttctggaacaccgcctggtcatcaatacgcatctcgggccatggcactgttacctgatttgtcaggagttgacgaagatcccttgggttgtatacaagcacttagcttaggggcagtatatcttcagtcaatagatatgcgaagagcagctttccaacatgttggtttcttcatctctcactggtactgaagtatctaattatgtgaacagattgggcatgccttacgaggctgtatcatcgaaggaatacacagacatgtacccgaagatatatgtggaccggagctctccaaacgatgcagaacaatattttgggtggtttatatgttggaccgagaattttctgctttgattggcgccccaagttcaatcagagatgaagatatcacagttaaactgccagcagagatggatgattcggtagaacagattaatttgacattgcatgttcggctttcccggcttatggccactattctgacaagtgagtcttttggctgattaggttggatgcagtgctaacgaaatctagccgtctacggggttggaaacgattccgatgacaccctcgttcgaagcacacagtccattcttcatagcatggccgaactctcatacgacctgactgcctttttaaatgctcattttcacgggttaattagccgcgcttcgaagatggcgatccgattgatgttagcccatcatcatgtgggttttttccgaactactaatctcaacatgaactaacagcagcagtgtattgtacttacaacaagaccgctagtgatgtgcgcacttcacatgcacattgaacgaacagagagacaaaaatcccaaacgatcgtgttagcaccgcctgttgcatccctcttacaatgctgcgccgattccgcccagactatcctccagacccttcgtactttagctgatgatgacttgatgggtatgaatttactagctgttttgaatcacattaatactaattccaacatacagacgcattcttaccattccaaattgaagacgcatcgtcctctgcctttgttctctacctgatccgcgcgattgccccatcggtgatctcgaacgatacttggtgtgacaacctagctttagtgctcgataaactcattgcaaagggtaatctagctgcaccacttcgcaggcttgaactcaagcaattagagcaaatactcgcacctttgacgccaaaattggcaaatcattctttgccgcaagctaacctggatgaatataatgaaattaatgaggaaccctatagcttcgatcacgaggagtttgagtgggatctactgggactcaattcatcagtcagtctcccaccgcgggaattattggatcttgcagatcaattagacgtggaggggatcatgcaatctgttggggtttgatgtcttgcaatgatctaataaactatacgacttttcacaagaattcatgaagttcaaaattgcagaacaagcagagtctgttcttttcgtacgcgaagcgaatttggtctagtttacgacagtcggagggtccttgttattgatatttgtcagaatcaaggacgaaaaaatgacggtattcatcctagattctgacaatattgcaactagaaacttccttgttgactccgtcctttcgatcttatcgtgaaattgtcggaagactcacccgacgtttcttcagtatctcaaaagacatatcaaatagttgaaacaagcatcacggtcgcatttaatcttgttgatctacaaattctttttattcctctataatgtctcgtaccagaacaattggctgctttatattcaaccagtatgtcaacctttgctcgcaagcccggccagtatctaatttgactccaggacttggaattttactccgatcttacctcgcattgggtgccattcattgcaccaactgagaatgagttcctcagcaacggccgtggcatcagatgctgaaaccgcaacggcacaaaaaaactaccaagtagtccaagacactggcaatttcgacgagatccaagccaaacgcccagactttgatcattctaagcccatcgaagtaacaaaatcgccaaatcccaactgggagtatgggcaaggggtacccgacaatggagccagccggacgcaaaaacatcatgaaatcgacccttacgcttcagatcgcccgatgattaacaactaccgcctccttgtctcggggattgcgcctcgaccggtagggtttctgagcaccgtcaattccaagggtcaaaagaacctctccccatttagttacttccaagtcatcgaccacgatcccccgatgttcattgtggggttctcgtctcgacccggtcgagtcaaagacacctaccgcaacctccaagagaccggggagtgtgtgatcaacacggtgtcggagaacatgatcgaagcagtgaacgcaagctctatcgatgctccatatggcgtgtcagaatgggatataaccggtctacatgaggcgccatcgagtactgtaaagccatctcgcgtcgccgagtcggtgttcaacatcgaaggcaaggtggttgatatcaaggagttcacggatcaccaacagcctggcatgagccttgcagctactgttctcattaaggctacccggttctgggtcaaggagggcacggccaatgaggattatagtcacattgacttggagaagttgcggccggttggtcaacttgggggaatctcttatggtcggattgcgtcgacttttgagcacccgcgaaagaagtggggtgatgaggtgccgaagagtgagatcttggctaagctagatgctgctaggcctcttgaggaatgagagatcatattggtgcctgaggtgctattgctagcgttgtgtctcaggtgccagcgcctaggcatagttaactaatttcctacacagtcaaacaaagcagacttcgaagagtgttccctggtctttatataatagcatatatgttaactatatatactactattaattaacatcaaagatgttaacggcacgtagaatgagggatgtaaccccatattttaaccagaaaccaatatcagccacccccttttaatctcttcgtcgggacgaatcaacttcttcaattcgtacggagaactccgcacatcgaatagggttataagaagcggtacacaatctggaacaccagcccgtttggtttgtttctgtttttcttctctaagacattgtgtgattcacttattattcacttacttggagatttctcgcacacactcctttatatcccttctgatctgagaacccccttcactctttttatttcctggttctcatcaaatacattctttaactttgactataaccgaccaccatgctccccacactccttaccgtctttcgtcgcgactgcaatggcgacgaaaccatgtccagctgcacaaagcccaccagctcagcaataaccgttggcattcccgccgcgatatcaggggtgtaagtccattgatatacttatactatcgcccattcccaaccatggcagaactaactatatatcagtctccttatagtcgccattatcgtcctggtagtcctataccacaagcgcatacgtcgcgatgaccgcgaagacctagaagatcgccagcgcagctctggcttctatgctcgctacgcaacacagcgatttggcacggagggaggaccaccaccatcgaaaggaggtgcctatgcttctgagtcgcggcgcagctctgccgattcaatctttgatttcaagcaggatcacggcccctatcaccttgctcagttcccgaatcctgaggtgccgaagccggtggctgctcgggtcgcttcgtagtcagtgcggggtttgatctgcttcttgctgtaagtcttgatggtttgatatgaccaacctggagttgggtgctgacttgcgttaggttcctgcgggtcaggacggtttcttcgattttcggcgcttcttcttatgggcgaacctgcttgtttccaaggttcttttgtccaatgtatgtaattttatgactttcgagcgatctgaagccataacgtaatagcgaatatttttttttcccactttacacaatattcacggcgggttggaacgatgtagataaatgtctgtgttcgaaagctaagactggtataaacagtaagtcaatagtacatttgtagatactgaaatcattttcataaataatacattggtcgtgcacaagacacgagaccaatcactcggcattctctatgacctggtcctccaagacttggtcactgcgctcgggggatggctcgaccgcaggttggacatggaaataccccatttggaacaagacattctgccattctggccctgcggtggcttgcactttgtagtaaggcgtgtccgtagcgaaccacctctctttgcgcgttgaggctttgtcgcctccttcgagggctgcacgactagcacgtgtcgtgcgggaacgcttctcgccgcgcccgttctcctgcgccgtgagtgcaaacagtctctcgcggtattgctggaggcggccgtcgaagaccatgatgccacggatatacggagccaagtcttccgtgatcggtgcgagtccattttcgaatgagggggcgtggcgggcggttggtgtagggtttgaatagttggcacgcatgataggttcaaagatgcgttggaattgagggagggtcgatggaggggtctgcgggggcattgcagaaatgatggctttgttcaagagtcgggtcgcatatgaagatgccagatcctcggtatttggaggacggaatgttctacttatcaatgcatcgaaggtagtgccgacggcttcactgaatgatgaatactccgttcgcagctctgtgtgcaggagtgggtaatcgtcaacatagttggatttatagccttctggcggtggtggggcggatatatcaatagcatcctattcaatgattagctggcgtttctgtggacttatcgatcaaacttacattgctcgcgtccgtggaaatattggagcaaaggatgtcgagagagcttctcatatcatagtagtttgcttcccggaacaacatgtcaagttgcgttgtcttggaaagagactgaaattgaccaggggacagaatttcaacttcattcttcccagccatgtcttcagaatcttgcaggctcaggccccacgattgaagactgttgtgaatgatttccgtctcttcatccaacgaaccttgggccacaataatatcacgattgagccagcccatatatcgctcgtatgtgttgaggctcagaacccggagtcgatccccatcatgatccacgtttgagccaggtggccaaataggaagtagccaatccaaacccgctttctcgctaccaacacccatctggcaccagaagtttaaattcatcagtgacttccgaagatccaatccggatccttgataaagtctggtaacggcctctctctttaaaatatgcccctcgttggcggcaaccaacagcaagtaatcgacgctgaattcgggagcaggcttttggtatcgtagtatggcatgaagggacatatcctgggtagggactaaactctcattgttgcaggtgatgacgatgggccgtttagattggctaataagagtcaggacaccactccaaaattgacgatcttcttcaaaaagaatatcgacttcttcaagcaggatcaaagattgtttttgctcccgggggcgtttgggtgcagtttcaggcttagggctaggttcgccagaccgggagaccggcttgctggaatttgaggatgagcctttgaaaaagctcttcagcttgttttgcttggcgaaatctttgttgtctgttgaattttcggattcgttgaggagatgaacaagatgattttgcgtcatatctccgacgcgttctagcatatcccgggcacttcgtcggcttccagcatttatctcgaaaacttcgaaatcaagttcttttgcaacagcatagacagaagcggttttgccggagccagccggaccgctaagaagaatcgcattggacattggattctttctttctactccaggtaaaccaggtgctatgtcgcccgaccggacgactgtccttcgaggtgttgtggtcacgccgcccgctaactcatcatctgagccagagagacagtccatctcagagatctcatcttcgcttgatacaatgaaaccatcgagtttatcggttttttggcgcttcttcgcctttctttcccgcttcaatttcgcttttgtattctcctttgatgattttccggtatccactgctgtgattttgagatgccgtagccagtctcgaagcacctgtggttcacggccaagctgaaggacgtcttcagctgactcgggggcgtatttgtgtgtccaaagctgtggttcgtaggttgcacaatcaaaagccgaaactgatgtgagtagtcccgatcgaagtttggcaagagggggactagcagaatcccaaggaaatttgccgtttggcgaggaccacgacatttgtctttccattgccgtatgcaagacttgactgctggcaacatgtcgtatgggatgtcgaagaatagccagggcatcgtagtcctgtttagacaggcgggcgatcctgcttgcttcagccgttccagctagaaggacgttttcgtcatctctaattgagatagctgcaatcttcgatttttttcggtcctgggcagtatgccagatacggtcatcaacatctgaaggtgagtgagcgtctctaacgtgcacgagatcctgcggtggccaaaggggatcaagcagttcgggaaacttagaaacacgacggggaaagctagtaaaggagcttcccgaagctgcaactacccgcttcttatctggtgccccagctgtagtttggcttgagggcacgctcacgctgctatctggattgtccgattgagatccattcaagctctcgggcccggatttttgtgctgatttcttgctgaaaaacgggtgtgtgggctttcggggttggctttccttcttgcacggcttaacggatggtatagtggcagggggcttttgaacggttcgactatcttggatatcatcgatcaactttccgatgttcttttctgtggcaacactatactttatcgtcaccaccttgcgctcagcttttcgcggcttccttcgcttccctgtaattcccttttttttcgcctcttgatgaggactggaggtgggtgacgacagcagccctccctttgaattcaatttgagaatcttctgccttgcagaggttcttgcacctcggccctttggtttctcgttctcggatggtgtcaatgattgagtttcatcttcaacaagttgggtctccaccagcggaccgtcgggtggaggtgtagacacattgatttcggtctcgggaggattatcggttgataaaggcgtattgttggtcacattataaccgagccattctgccagacctgaattggaaatggtagtggatccggttgtttgaattttgttcgttcttcgtctctttctccggtgttcattcaggtcttcgtcaagatccgcagaactctcattgtttatgttggagacatttgaattgtagttccccgggacctgaagcccctcctcgtgcgtggagctttggctgcttatcggtcgaggatcgtgtacgtgggaattcacaggcaagattggctcattcgagggtgtagatttgaccgagacaccaaattctagacattgtaagctcagagtcacctgtagctataggacacatcctgaccttgtcggaagaagggatgtatgacttgctcttcgtcggttcccatagccatcggtagatttgatatgatgctcatgtgaacagtcagttgatccctgaggagaggccagggagcaagcggtatctcagaaatagcattgaaatgacagaattttggtggtaagtgtggtgcgattgcatgaagcaagaactaagtcaaggccgatctccatagcttcagacacgtccgacgcgaagggcgcgttaattgcttatgtcaggctgactgccgcacgtaccaacgctagccctgatatggcttaggggtggatataccggcccgacgtaatcccgaaaatttttcagatttccaaattggatgggtctgcatggaaaagatcacacgctttgagggacaggaacttaagtcattttaaattcctggtattccgttcgtcatggatttgcagtccccatctgtcctggcgcaattgcctcggccccttcacgcttctactggcaaaacccgcgtcggggatgtcttcagtctcgccgatgcgaaaaaacgcaaacgctatgaagtcgcagttgccgtagatggcgaggctgtgaacatttacaacgtatgcttgctcattatccaatgctccctcagttgcatctgacactaatctttatcaggttcaaacacctaagctcgtgacttcctacgccgtcccaccgcaatctactttctcttgccgcccatgttcagttcgcaggaagctgtcaaaaaaatcaacagtccgaagacagacttatactgctgtcacgaaacccgaacatcagatcaagtgctttgtggaggagatcggcagcagcggctcaagtgctccggtcatttcttcttcgactaccaccgtgaccgactcgaccagccccactacttttgtgggaattgtgccctctagtaccgatgccgaaggagagacggatccatttgatatattggctgtccacgaggatggtcgtgtgcgtagactgtcgtcggatttaaaaacccaacgatggagtattcagcacagtgagattgcaaaggtttgctctactcacaatgttcaatccagcttcttggttgaatttgatgatgcaaagaaggctttgttcaaaagacgacaggatttggcattgctggcgctgggcgatctgacaacctcaggaaccaacgagccgtctatcttgcttctggtatcccaaccgaagaataccgatcgagtctccctcaaagacatcattgtgcagatgttctcagtccccgcgcatgcgaagtcagagtcagggttggacgaaagtcagcgcctacgccatctacaaactttccacatcccggatgtgagtggcctagaagccaccaatggcaatgctatgcaatggagcttccattctggctcagcaggattgagcctttctttcgaaaagggtttcatcaacgttgacctctcccagtactctccctgtgtcacatcgcaattcgtccttgaagatgaggaattctcctcggtcatgcgcatttctccccaatctgtgattggagcccaaaaatctcttgtggcggtatatgatactcagtaccattctgtgcagcgcagcattccagccggtgatcttttgtcaagcactgggtcgaccccagaggctcccacaaacttcatcagctacttcgccaaacttgggattgctatcgcaaccaagggcaatacccttattgcttttgacttgagctctctccctagtgcgcccagctcttcgctgaagcggaccagagatagcctgctcatcgatgctatcgggagaggtattggttcttctggtgcacagtgggatatctcatcaaagaagcaccgatctgacaacatggcctctcttcggcttacatcaccggagcaagttgagaaatggacacagctcacaaaaacggtggagaaggcgaccaagacgaagaacattgacttgtttgataatgcggtcctgacctacttcagcacatcggatgcctcaacgacgctcccagtgcgcgggcagtatgttaaccccgaagcaactcttttcttgctgtccaaaatattcgctgtggaggagtctgccacagatgatacaatgtcggcctccccttcatctcaactccgtgttgccatgtggcccccgactacttgtgactggcttattcgcttgggacatctgtcactcgacaatgttgagattgcgctccgtcgtgcatgcaagccacgcattttgcagccattccccaccggctcgttcatccaggctctcctcgattcagatccctccttgaagcaggtcaaccaagtgcttgagggaccaactctgatttcctccgatgagttggcctacgcgctcaaagccttcttgaaccaggcacgctcgcactctggaactctcgaggaaacagctcgtgcgatcacaaacggtgatcttgccactcccacccaggaactttctagacagctaggggccgaaacggcaaccctaaaggatatattcgctggcctgaatacctcccttcaaaagattcactcgcagcccgtgtcggttgtcgttcattccctccgctccaatctctcgcggacagaacttatttctatggttcaccatctccgtctttccctcgctactggaggctacacttctcggttcactgaaaaccccccaacacctattactctcgaccaaattactcccactctttctctcgatgtcatcattgatctcatcactgcctctgtggatgccgtgggtccatccggttggatctcggccgtccccgcagcgggtgactttgaggactcagtcgctgccgctgctagccgtgaaatggaattgattgcggacatgaagtctgaagtctccgccgcgcttgcaggagtggaagaggcaacctatctcaagggtgtcttgtgcgagtacctccgcttcgcggatcaagttgacacccccgctactacctccgaggatgccctggccaagatggattccgaggccggtccatcgcacctggtccgctacgagaaactcaatggcgccgacttgcttgtcttcacccgtcccggcgagggagaggacggctacgatggcgatgctggtggcaaaatgctaccgctgtcactcaaagctgcttccaatgacgtgtcccgcactaagattaaaaaatccacgggcgaggtgaagcatcgcagcagtcgtgagattggttacttgcgccgcaaggcggttggcaagtactcattcgagagactgattatttaagagcatgtgcattccatattttttactgtaaaattcattcttgagggagacaatatcctaggagttagacagaacaatacatatgtgggttcccacgtatttcaattcttcatttttttttcttttttgggcaatcaaggacttctcgcccttgcgcgtgttaaaaatgtttcgacgatactattggagccagcacaatgaaattctcgagggtcaatgtatttggctgtttttggtagttggcgatctaccttgggagccttgcagctatatataagtgggaccgaggacgaaggattcatccagcactgagaaaagaagatcttttctaccgatccattgaataacattaagaacatcactaaatattacatagaatagaaaataggatcaactcaactaacgcttgtttaccttaaataaagaacaaaacagaactaagtgggactagtcaacctgttaagctacaaagggattcaatagtctagctcggatctgggggtttagagatattcttgtcccaggccagaagacaatagtggaactagggttaaatacagttgatagatctcaaaacgtctatactagtttatattattgctttctatagaatatcaatctgggcgggaggccaaaaaaggtaaacaagaaagataataaacaagggagagctctgagtggagataccctggacaccgcatctccgcactgttcaacccaccgttcaacccaccgttcttctcattccgagcaaagattagctctgatctatacgttttcatgtcgttggtgtcgatgtgaagttggtttggatccggaacgcgtaccggcatcaaaacaaagaaaaatgagtaaccaaccatggcttgacagtttgtcggacgactggccatctctagcgcccaacagtcctgtacctgttcctgccttaccggagtcgcctaaaaccagccagcagggaactcctagtcgcattcctatgcccgcgcggcgttcccaagaacaacaatcaccgggaagcaacaaaaaggacaaggttacccgaccatgtcatttccatagaagagaacctccgacgccgaagaccccccaaccattcaaaacacgcaaaccacgatcgcctgcccctggtagtttgaaatacagccctcccaagaccaccccagggccctacgccaaggaaaatctcaaggccagccccaagccgacgggtcgcagacagccctcaatggatgcgcgctcccctctacgatcggtttcaaacgcctccagagcctcctccacaacttccgaattcgacggtacggttcagatcaaatcgaagggcaaggacgcaaaagagggtaccccggaatggcgcagacgactagtgcgcggggaaatcgctgctggcgagcaacgcgacctgttcgcgccgataggtctcgaaaccgtgttcaagccgcccacaccccgtgctgaaacggaaacggcacaacaggcctctactccctttacgaaacaggacgacaatctgtgggatttcgccggtacatcttcgcgacaaaatagagacgaacataacagtcgcgaggatgatctcgaacgcgtcgccaatgaggatgtaagggaccatggcgaccagtcgccggaaggaacggtcaatcgcgctccttgggagaagaatgggggcctggacgtggattgggatcaggaagggctctcacaatcggggaatacacaactacggactgctagtgggttggaagatctgcgcaatgaaggaatcacacccataaccttctcccgcaataacactgttgatggcaatgggacttcggaagtcatcaagtccgcgctgaagcaggtcaccaacaagttggaaagcctgtctatcgaaaatgatagtcgcccggactccgctgcaagcgatagcttcctcttttacaaccacagtgaacctaatgcggacgggtctccacgagatgacagcttgctggacgcgacaagtcattctctaccccgggatctgtctatggggacgatggacttcagcagtcggcgaaaaaaccgctccttccctcggcgattctccccttcgccctttccttcccaccgtttgtcccccatcaccctcgccaactctaaaatccgcagttcacctctgttcaacccccctcacaagaccacgtcacctggtctaccgcatccttcctcgtctcatgtccggccggccacggctggagcagagaatgaggccaaaatgccgtcatcaggaagtccattgaagctgttcggtgaccatgacacattcactaataacagacttctccggcgcatgagccagtttgaagacaatttcagtgacacatcagaaggagatgagcccccttcgccctcggaggaagcgcgacgaaaaggcgagagccgcagctttttaaattcgagacacgagccattgcaggagatctcccctcggcgaaacgaacgtcttggatctcgcaatgctgtaaatcgaatcaaccaatttgggggtggcgagttggatacatttgatttctcagacactagcccctacgagcacaaattggtgtacgatgaggccggagggtttgggtcccgcccatcttcacgcaagcgatcgtcagcccggcaacaatatctccgtggcccctcacagcaaggattgtatcattacagcagatcagcgagctcaggattcactaggaaaccatctgcctggatgcgccaggatttctttgatgatgtgcgacacgggaatcggcccaataacaaggaaaatatggcccttgatgtcaagcgagtgccccgggcccccggcatggatcccacaccaaaacggcgccggacaatcatgagaaataatagctccgaacccaaacagaatgccggcggttcatctcagaagtatggcgacatgtcgctgttgcaacgaagtcttatgcaacacggtgtacagctcgacaatagtgactaccttgctccaccaggcccttctcactcaatgcagcgacctcgaacacctacaccaagccaaatacgaacagagggcgaaagccatatttcactgcacagagatttctccgaatccaatttcgacaataatgattattctgattctttttcccttgatggtgacgttccaatagtgaagattactgggaccagcgatacctcacgaaaaggatctatcaccactcaggattatttaaacgaagccactaagatcatggatctcatcagatccaaaggacgaggcgcagctggattgtcaagtctgcatgagtctgacgtggaaagtgaaggcgacgacttcagcgacgacgacgaatccacccgggaagcgttttctcgccctccgagccgcgacggaacggatcttcgcaagttgagagaggtgaaggaggtgaatccaatgatcctgagtcacctgaaaaaataccaggaacaagatgacccgaatgaccgagaaatgtccctgcatgctcgccatggccaggacgagggccaaaccgagatcggtgaatccaactcacagctcatccgattacatggaccgaggaaacgaaagactagtggcatgactgatgacacggcggaaaacatcgcccatgatctgatgactatcaacacacaaatgtccgggttcagcgccacctccgtacccacgggctcttcacaaggttcccacgtcaagggtatgctggcttctgatcttgtagcccacctgatcccgaatgaggttaatggcttcaagtatgaccgatcgaagaatcaatgggtgaaagatgaggcagaagaaccacatgcaccaatctccgaacccgcctcggaggctgatgatccattcaaagatattccggatctcactgtagacgagctccaggagatgttgagagtccagggtctcaattctcctacaaagaccgacgtcccaaccgagcgagagcaaaccaaggcccgcagtcctttggctgcgaacacatccccgaagaaacccgatgttcgaccacacaccagggatggagaaccttctcttggtgcaagctcggttcaatcaagattcactcgcttcacgtccagtgttcctaacacggggacaagagctacatcatggggcacagacgaagccgcagaaaggaaaatctccgagcaaggaaaacttgaagctcagcgcgacgagccattgtcctcgaagaatccccgatctctagggaaacaagcgcgtgtcgcaacagtgaatctctcatcgcccctttcgcgcccctcttctcggggtgagcctgataatggccagtccgacccgaccgcgaatcacacctaccacggaattgtgccagtcgaggattcagccccagcggaccacgaaaatggatcaacacggttatccgttcctcccacggggcgtcaaacttcagttggtggccagccgtttattcgacgtcctatctcgaggattgaggagagaaacgaggagaccgtcaatgaccaaagccttgtgcgcaggaatgactcacttggtgtccgaaagacaccagccagaaccgaggcagagcattctttgatacctctccaaagtgccgggcctgacacgagctacagcttccacctcagtccacttgcggactttaccgtccaccaagctgataaacccctgaaccttgaaatgagctatgtggctcatcgtacaaacccttcctctttgcgacaagtgcacgggactttcgcattggcaactgaagatttgatcaagcatattactgacgtggaaccatatgagccttattgggaacacgtgcgccgccttgtcttgcgcaataagggtttgattacgttgcacaagctgaacgaattctgtccccgcctggaagagttggatgttactgataacgacattggtcaattgagtggcatcccctcaaccctgagaaccctcaagatccctcgaaattgcctctccaaccttactccatggggtcacatgatcaatttgcagtatttggacgtttcaggaaatgatatcgagacgttggatggcttcgcaagtttgattcatctccgggaactgaaggccaatgacaatcagatccgcaacatagacgggattatttatcttaatggtttgctaagcctgaagctgagcaacaactctatcactactgtggatttcgaagggtccgagttgacacgccttcgtgatcttgacttgagccacaactgtctaacatctgtccggaatgtcgaatggcttccgtcacttgccactctcgatgttagtgccaatcagatcagcggctttgactcgtctgcttcccttattagtctccgcgccctgcgactctctgaaaatagattggaggctttagatgcacgagctttcccttccgtgagccttctctaccttgatcaaaaccacctttctaccgttattggccttgagaattgtcacaatctcgaggtactgtctctccgagagcagacagcgtccaaagaagcgtctaaagaaaagaaaattgaacacaggttagatattgacttgggacttgtcaaggatgttcgcaaagtctttttgtcttcgaacaagctttccgaccaaagtgtctgcccttctgctccgctactacgacttcaacttctcgatctagctgcatgcacattgaagagtctcccgggtgattttgctttaagcttcccgaaccttaaagtcctaaatctgaatttcaactcggttgatgatgtggagccactgattggaatgaactgccttgctagactgatgatcgttggcaatcgtctctcaaggatgagaagaatctgtcagattctcagtcgactaggaaaaaccggaaaaggaactgcatgttctttgcgcaagcttgatatccgtgggaacccgctaactgttggcttttaccccccagcggtgactgggagtggcaattcggatcgcaagaaattgaagtcgcaagaacaagcagtcgtccgacaccaagggacccaccgggacctttctgatgctctagctgatctggggaacgatgaccagagctctcaccgtgccaccgtgggcgatcagccgacagacagagaccccgaagtcgacgacccatacacacttccgttcgctgacccgcaagcggatgtgaagtacttaacgcacctcgatcagtccacacgtctacgccgaagagtgctagagctcttgctctacgccggcacgagtggctctctccacaccctcgacggactagaccttcggccctcgctgggcgacgagtcctccgacatgaacaaggcgtgggacagattggagaatcttggtgtattgcggaggaaagcgatcaaaaattaggctatattctttgttattcttctatcgagtttttttccccatcatgcgaaaagcgcgcgtgatttgagcattgctggcggcgtgcatggagttttgttgtttctcgagttggaattagccttttatgtttgtacagcatcagcgcatcaccggagttggatatcgaatcaattctggcattttagcatttcttattgttgcaagctgttcgggctttttgtcttattgtggtacgccataatagaatgagatagagccccatgcttgatctacgtcagaacttgtctcgctgtgtggtgaccttgtcttacggcctatacagaaataagcttacaattgccccgaatttggctatgcaagcccccaggtagtaagctcattctcagacagcaatcgatatctctcttcttctagtagcacagctccccgagtgatatgattttactagagcagtggggctctgtggggttcgggccgacccgatgaaaggattgcaaggacttcctggtggctaattaccaggaacagtccacttggcgggcgcgcgatattaaatactctggaggtattcaaaaatttgaagaagcctgggatgttggaataacaatgtgttagtaaggaccgaggtctcttgtattgcgaaaaaattaaggatgaaatttagtaaaaatagaaagaaaaatacatagaagtatataatccagcgtatgtagcttaataacagaagtcctgctatataggctgccaggtcaggtccggacaccacaatccgaggacgtcaaattatttcttgccctgaacaagaagttgcttctgcttcttgatatgcttgaccacttcgatatcgatcttcaagacgttggcaacagtatcagcaggagtcaacgccagccactgggccagggagatatcagcgacgcggtcgctcttgtagagctcgatccacacgagtttctcggtctcggaggtgttctcgatatagtgtccttttaaagagatttagcatattgactcggtattgggaaaatggagaagtatacttaccactgttgtcggggaaaacaccggtgtcacccgcgtggaagtcgaaggtgcgagccttggagtcaccaatgaacactgtagcacgggcttgaccctggtggaagtagagccattcctcagcctagatggtggttaatataggtttcttctcaggcacttgtgtgttgtgtaaaaacttacattaggatgccagtgaagctcacgaagacccttgggctccagttccacaatcgaagcagcaagagtctttgagatggggaagttggtggaatcaatcttgcggagtgttccgccgtgaccagggacaggctcagaggggtgcttgtaggtgtggtagacgtaggaattgtcacctctcaacgtaccctcgggagccttgtcaaggtctttgctgacagtgccgttgaggatgtaagggaactttgaagggaccgagtcgaagaccttagggtcaacaccaaagttcttggcgagaatgtccctgggggtatgggcaatccagtcgtcaaccatgaaggtagtactttttaattagtatattgagttttcaaaagtgtgaatggagcatacccaatcttctcaaagtcaccatcatcaaaagcgaggaggtactcgttctcatcgtctagaccctgcacgttatgcgcgacacccttagggaaataccagatatcaccggtttcaagaacctcggtagtgaagccgccgttttcatcaacaccggacagcaggagcgagccgttgtagacaaatccccactcggcctgtgtcctaaagtaagtcaaatgtcgtagaaagtatatatgtgcggccactaaccgtgcggtgccagtgtagttcgcggatggcgcccttcttcagatgctgttgggcacctgcgatgtcatggctctgtggcagatcctgaatgacttgctctcgagaccagccgcctgggaaaagccgagtctgagactcagagaagctccacttgacgttgggcacaaagccattatcggtactggcagtgcggaactggtctgggttttgaaggtcgagcactttgttcgttccgcctatttagagaaagttgtaagcatgaatcactacggctagtacccgtgaagacctcttccagccttaagaggcttacctagaatcggcgctcctttggcaccgctaatcggctggtcattgccatcctgcctcttagtccgaggtactgcaaaggcagaggaaacaaatagtccaaagagggcgaggctttgggacttcattttgaatgaaggaaaagaatgtgcaaaagaatgggattggactgagatgcctcaagccaagcacgacggagtcatcccagttatatatgacaattcgacactaacccaacccctccaaataccgagggggcatagacctccaggaattcagctagtttcaatgtgccgctccctagttcctcggcgttgagatgttgatcctaatgaaattgaccagaacacgagttatcagaaagtataaacagtcacaagagatgatgcaatccaggaagatctactccgtattccgtatccatcttgcctctcacggaagaggttgcaaaagaagccatcctgaatcgataatagaccggaaggtacggagtagttctccgtaaaagaaaactaagcatggccaaggatataacaacattcttggcatcatgtcgaaatcgatgccgggtctcccgtgctaatcgtctctgtggggaaatagacgatgtcgatccagggacctgacaggtaacttgttggtcacgggacttgaaagtcgaccctggatcacctcatcggtaccttgaatgagtacatagatcccacatttcttggcaggcgcggatcattcctctactttgacctctctggttgctagtctcaaaaataacttgacatttgctttgacctctggaactcaataccgttccttgtttgagtgttgagtcgaatgtgagatttggtgatcgtcgagggcggttcctggaccttgcctattccggaaattatggattcccttaaccctagttcgacgacccgttcgtccacaacgcatcaatggcactgatagacagggcgaggctcagtcccggtatagatcggatttggttttgggtttgagctattgatttcaacttgcagtctctctcaactttggattaacttcaatcacgacatcttcttaagattaagaagaattgacttctcagaaaatatctgaatacggggaccacaggtccagcgtcagatcccgagtcggggattgttcggattctcatgtgggcgttgaggtatgaaattcgccatttcgcagatcagcgtcccctcgaggaatttggaagatcacacaaacccaaaatgagacttttttgcgtgctctatgctgatattgtcgagatggctcaggggaagagcaagatggtacctcaattggggcgagatgaaggcatacccgggtatataagctctcgaaatttcccgcaaatatgctcatcaaaccaacgcaatcccgctcattctctctctccaacaagatgaagtactctattgcttctattgcgtcgctgattgctcttggagagtgtctttctttgcctcctctcatacccactattcctggagtgaccgaggctttgacgaccaacgctcctcctttgccgattttgcaagtccctactcctccactggagagtcctcccttcacgcccagtgacatcaagccgaagaagattgggtatttctggactggctcaggcgacaagttccataaaggtatggatctacgcatggtggattgacgagaggagatgatgctaattatcattggtagacttccttgctacctatagtttggatgatgtaggccaatcctaagcctggtacggagtcatttgaacctaattgctgattcgactttaggacacctttggaacccttttatgggtcacagatgtgcccagcagtggcaatgacccccaccacctgggaccgtcgctggatggaaagaccatctggggtggtggattactatctctcttgaagactcaagtatgtagacttcttctcaattcgcctttcacagcatatctaatccttcattaggatactggtttctactttgacacctccaacccttaccgccccaagttcttgaagagtaaccgcggtatccttgcatccattgcggatgaggttcgggcaaagcccgatggtggatttttcatcacctacatgggctcggccgttggtacctcgcctggtcgtctcatcgagactgatgccgactttaacatcattcacgaatggcccgaggatgtggaaggtactctcaacattcttgaacagcagttctcccctcacggactcagcatcgattgggagaaaaagctcattctgacctcggacttcgtcgagccgattactatcttgaagccaagtctcggagtccgccgcgccgatacactgcgtctctgggatctggactctagaaagattctcagcaccctcacaattcctaatgtaagccagcccctgaactttaatccgcatgcatcttctaactcgatcagggtggtggtatccaagatgtcaagttcattcctggacacccggaatctgctgctatcgccactgccgtgcacctgggtcagctttggatcatctaccctctgcgaaaggacgccaatggcaaacagggtgtgatcgagcagctctacgatcttggtcccaaggcccgtgacaccattgccatctagtaagtagcttatctgctgtataccataagaaaatcattgctaacaacatcaccccacagctccgacatcagcaaagacggtaaatacttctacgccacccttaccacagccaaccacattgccgcgctagacattagcgacctcaacaacgtcaagcgtctggatgaccccgatgaggatcagcctaccgtcggacctcactatatcaaggtcacacctgaccagaagcacttggtcgtcaccgactacttcgtccagactggcgacattggtatcatcaacaccccggctgacttcaaggcgctctacatcgaccttaaagaggatggcagcctttctttcaaccgctctattgacttccccaaggagttcgccaatcgtggtggtgctaagcctcactctagtgtggtctttgatctcactgaccctgagaatcctatctactactgagttatcccagtggccaatagtaggatataggacactgtcgatgtgaaatggagatgtgaaatggagatgatgagggcgggatataattttttctcttctgaacttgacataggccttcgggcgatgtattttattgtggatatactacagctacttcttagttactactaatggacatccactgtactttttttggtgaagaaaatgaacctaatattacacagacactttactgggtattgaaggtaaatcaaaagtgtgaactagagtgtagtatcatggagggaaaaaagcaaatcaatataaagatatactcattagagccccatggctaaacttcatgcacatttgatgtagcaaccttcgggctttcatctctccgatgccgaccctcgatctgatctggagacactgacgtactaacccccttgcccacaacgatatcttcttccagcacagcgcggaattcctcgcgctttggcaggaggtaccgcacatccacaaatctcaaaatgctcgtcataataatcacaagaaccaacaaggccaaggcggactgccacccatatttatagaagggtgcctgactcgcaggccagacgaggacctgcgaccacgaggagatggcataatacccagcaacagcaacgccgaccacaagagaccgcgcttctggatcctgcgggatgagatcagaaagccaggcaaagatcaacggcgccgtgccgagacagatatacgagatgaagtatgatgcataaacagcagacaaacccaccgacagcgggtgtgtagtccaaatgctcatgataatacacgggactatcccgataaccgcttgaataacgatgagtgcccaacgagtttcaaagtaatcggataacagggcccaaatccacacgaacaccacattgatcgccgatcctccgatggggatagcgttgacttgcgagacggtccatctcgcgcttccgtctgggttctttagcgatttcaggaacagcccgaaataaacatatccgtatgttccaagaaccgtcgcaatatatagaatcgcgatgaagtaaacgacccatcccgagaacgtgcgcttcacgccggcccaggtcatcttctttggctcggcgcggccgttgcgcgccaggcgttccagcgaaagctcgccgtggactttcttgaaccaaaacgcacgcgggttgggtctgttcgggagatcggggagcatgacgaatcctgcaaatccccaaattaccgtgatgatggcgttgatcacgaatagccagcgccatcctgctaggccgctatgcccgtcgagagtgtcggtgattgcggcttgcatggcgcccgagagcatttgcccgactgcttggcaggagtggtagaagcccattcgcttggcgagttcggttggggtataccagtgcactgtagggtggttaattcgggtcaagaaaaaggccttggaatgacatactgaataatgtcatcattcctggccaagcgctactttcgcatagaccgaggaagacacggatgatgtagacttgtttcgcactcgttgtcattgcgaccaacccggtcagaacaccccatgcaatctccaagcctggcagccaataacttgggcgtacgtaggtgagaatgacttgagagggaattagcattatgcagtaggcgacgttgaagtatgttgtgaatctagacagtatcagccatcaccaattctgaagtatggatgtttagggcaactcctcacagattaagctcatttccgagcaagttcaaatcctctttcatgccagacacgtaggcattgttgatattctgttgatcaagatatttgataactgacagaagtcagttttgccgatctcaagccgtggggggatttgtatgccaacgcaccctgtgaaagacaaccgaaagtcatcaggaacatatcaaggcgccggaccaaggccttttcctctggagagcggaaatcgacatttgtcgacgctttgcgacgaaacattttgaaggagaccatgattctggattgacagggatgagagaaaagccaggattcttgcgacggtggctattcatatacaagcccatgcagatccaagctgtgataagctccctgcaacccctcagagataggtcacataatgtggacaaagtagacatcggatcctagatccgacaaggattctgcgagatgcacgcgtgataagcattcgcaccaatggttgtattcctccattgacctcggaggaatgccggagtcgttgatatacaagataccaggcatgttggctattcaccccactttccacaaatgaatttggagataagttaaactcagaataatcctatcaatcagaagctctagagaggagagaaaaagctttcgggtggatgtccgtgataggagaaccacagcttccccgcatctctgcgccgacagcggtgaacccgagactctctctcacacagagctatatatattctcaaggatttacggaaatcttgactcattgcaaattggttgaaatgttggttccgaatatcgcgacaagcagaagcctgccaaatcccactccttgcttgagttactggcagcgaacaactcgagcatatccacatttgtatgcgaatatcgatgcaactgttccatcgaactcaaaatatgtcatcgtgggatctggtatttctggcggtttgacggccttcaaactgatcgaaggaggggccaaggccgaggatatcgtgattctcgaggcgcgagaggctgccagtggtgcgagttcacgaaatgctggacatgtgcgaccaggtctgtcaggcttcctttggggttattgcggccatttctgatttggaagatagatgcctttcggggtttcagtgcatattccaaagtgcatggagagcaacaagcgttgaagatcatccaggatgagcgactcgtcctagaaaaagtcgatgaatttgtcaaaaagcataatgtggaatgcgacttcaacttgacaaccacgtttgatgtctgcatgacccctgaatttgcggcttacgaggcagagagcctggaagcgttcaagaaagcaggcggtgatacctcgcacatcacgttctatgaaggggaagaggcacagaagaagaccagagtccccggagctgtagcggcctatgaatggccagcaggctcaagccacccggcaaagcttgcacagtttcttcttcaggcagtgatatccaagggtgcgaagctcttcacgttttgtcccgccactgaagttgaacggagcagtgacacagaaacctggaagatacacacacctcggggaattatagaagcagagaaaatcattcattgcacgaatgcccatgctgccttgttgctaccgcagttggagccttacattcggccaaaccgcgcgcaggctcactctatcgtgcctgttccagctttctctggggaaaaggctctacagagcactttctcgctccgctatagcctcctccacttctactccttgattcaacggaagggagatggcacaatggtgctaggcgtatcgcgatcaaacccaacaatgagcgctgagacaagggctggtcgattcagcactgatgattcccggtataatgaagaaattgccgaagaagctttgcggacttttagtcagatgtttcctgcttattcatcccaggctgtcatgcacggtgagggcctggatcatgtttggactggaataattggcatgactacggactctgttccgttcgtcggggcaatcgattccctccctgggcagtatatttgtgctggattcaatggccatggtaagttttgcttttgctctactacgttttgaaagcggacgtgctgactggtaataggtatggcccggatatttacatgcgctccgactgtcgcccaacttgtacttggcaagacctgggatgaaacggggctgccagaatgtttccaatttagtgaggaaaggctcgcacggctttcaaatggagagttgccttcaatttggtagcgaagtgctcatacccgggggccggaggattgtctgattggctacaactagagcttcacgggcttggactctttcaaatatttagaatagacagggaaaaatagaaatcaagcctttgagctgatatgtaacaacatatcgcgatactctaacactgcaaaggttaggtgagtgaagagacaggggtgcagcttagtcaaattaaaacaaagtttcaggctgctctttcctaattcacactttccccttacctgagtatttcatcacatcttaaggaaagcagcctagaaccttcattaacttattggcattgagttggaacaaccctagaagctccttccaatccccaaagtggggcatcggaccgtcccgaaaggaagcttccgagcttcaattccttgaagccaaattgttcctcgaaacttcactatgattggccaacggtttacaagtcgcgtcacaaagcgcgcattcatttcgctccgtacgaaaccactcaacctccctcctacaggccctactttcgccatacccagccacgaagtcgtcgatgaagaaagatgtccgaactatattccccaacactactatccagcaagaccgggcgagatacttggcaataactaccagttgctagcgaagatcggctggggcacgagttcgaccgtatggctagcacgagatatcacaaggtagttttggttctacgccaatcctgtccgaggctaattggagctgctggattaccagatatcgatggcagtccgagcgaacagttgctttgaagattttgaatagctgcgatgctaaatctgctagtgaccttcttggtatcgaggagactgttgcacaaaagaacccttcacatctgggctattatattacacgcagctgcctggaaagctttgagcttaagacgtcggacaaaatgcacctttgccttgtatatgaggcaatgcgagagccaatgtcaatgtttcaaagacgcttcaagaaccgcataattcctctcccgattgcgaaggcatatattcaattgcttcttgtcgggctacagtatttgcacgccgagtgcaaaatcgttcatactggcaagtgatattcgactcaagcaatgttatgtgaaaaaaaaaattgctaatcagcaaattcgctctagatctgaagctcgcgaatatcctgatgaccttcgaggataagaaagctatcccaaggttcattcaagaacaagtcaccaggctccccatgcactacaagactgatccaataaccaatcacaccacataccaaagctatcacggtttcggggcaatggacgttgaggacgtcgggaatgtacttccgagaataaccgatttcggctcagcatggcagttcgtcgttgacccggaaacgaagtcacaaaatgaagccgtgcttacgtatcctatacaaccgagctactaactaacaccgtgcgccggaggttgtccttggctatggatgggattttagcacagatatatggaactttggtgtccttgtaagccgcgtgaatatcgatgcgcctattcagctgtcaagactaactcaatggttccaaaggtttggaacatcatcgaaggcacagagctgtttactcaggttgaagatactaacggtcgatatgatgccaaatcacatctggcacaaatgatcgctctgcttggtccaccacctaagggggtaattgagcgagcagaccatatgtcacaggtagacttccctacaccaattaggattgaggcgggaaagctgtccaagaatgcccgagagctctttggtggtccttacttcgatgaagaaggtaagtcttctactcgacgtatgagtgttttgactgattgttggcgctagggaaattccttcacgaggaactcataccaagtcgaaaactggaggatacaattccatctcttgatgactcggaaagggaaattttcttgtcgtttgccagggacatgctcacgtggattccatcggagagaaaaactgctcgtgagctgatggagcatccattcctcaatttcggtggacatgtttctaaagatgccttggaagggcgctcttagaatgcgagctgttatatccattgatctcgggacactatgctgcttacagtttgtcttaccgtcagaagaaagctctccactatgtatgaaatctccactatctacggttattaaaaggactttcatgtatattgtcatggatatgcaaatcgaggttaaaattatggtacatgcttcgcttgtaaatgcagattactatcatgatatggttggaatgtccggttcagtatatatactcccgggcaacggtctcggtgaacgacctcaagaggaaatccccggagatctcgctctgccatgggctcaaataatatgaaaaaaccagcctctcctggcgggtatcaggatcatagggctatatcggggcaagccggtcacccttagtattatatccgagtccgagacaagcaatgctctctttctcagcagggttgtcgagtacgtgctcacagccgacgtacaaccccttattatatagaaacaaagaatcaagatcgaaggaatcacggcatatattcatagcgccgccaattctcctcaacccaccacttcgccacgtgtgccgcgtcgttaatccactgcacagcatcctctccatgctcaggcaagaccatgttcatcaaatccaagaggttgaaatcctgcagtgcttggagttcatgcgggtcgatctctacattcgagaacctccactcgacgtcaggaatgagtggtatgacgagacggtacggttttgcagcggaacgcagggcaagccatgtcccgccggtgttcatgactgagaactgccagtcttgctttccgtctttttctgggattgtgggtcggatcattgattggccttcgtagagggggaggagatcttggatggcggattttgcttggttgtcgagggatccggattcggataggatatcgaggattgtggggaggatttgcattgaggttactcgggagtcgatctcgattggtggtagttgagggtgggcaaagactagagggacgtggaagctggagatgtgggggttgtcgtatggggtaacgccgctgttctcggggagtgagatgccgctgttgggattagattcaatcgatcggagaatgttggagtttggttggcacttactgatccccgaccatcacgaccagggtctcgttggcaacgcccgtttcctccaggatgtccaataactcggcgagccatttgtctgcaacaccaagcgtattgaggtagcgatttaccttatttttctttcccagccagccgtgactgatcaattcttcgtacttgtgatttggtgtgtcccaaggatgatgcgtaatgccagtcaagtgcgagatgaatagtcgttctttccgtttttcggccgatttgattgcgttgcggtaataatcccccagctctgtttcgggatatccccagaaattgtacttcactggttgaagaccaccctgcttggcgcgatcctcggaaatgttgatgtcggttaccttgtgcttgaagcccaacgcaggtgtgagaaggtcttggttgtcgtagtcgtcagtgatggactgcatccatgtggatcgccatggccaagtggtatagtcctccgttttggtccggttggcctgagcgttgagtgcttccaggatatgcggcaggcacggttggtagatgtggtacaggtattcgcgattgaagtccacgaccaagggagcgataccgcacacagtcgcgaggatactcttcaaggtaaaggtatcgcctgtataagcgttggtagcatggaatcctccgtaaggctgtacagtatcgtttccattgaacccggaagaagtagctgttagtctctctgcggtgggtgttagattggctagcctttcttcaacctcagcagggatctggccattgtatgactcgcgaatcacgtccccaaaccaggattccttgcgaagtgggaagacgtctgcgcgagtgctttctagcttgagaagtaacacgtgtttgatattgacactgccgctttggagagccttgcggagaggctccagaacttcattttcaaggttggagatatgaatggggtcatgtcttggatcataatgcaggcgcgcagtgtgattggcattttcataccagtcactgaacccggccagtttatcccgtggcagccagtcaaatgtgggcggtgctgccagggctgtgtgatttcccaaccaactataatcacctgtcaattcaggtaaattaaccgatgacggagcgcgagactgattcttgtcgaacggtgtgacaatgacagtatcagatagaaagctataggcggcatttgaagggcgaatgcaacgcaaaataatcacaaggctagtgaatgcgagaacaaagacccgcagccaaggggatcgcggagattcccctgcatttgcttgggttgtttcctgagagcccgaggtcaactcaatagcacctcgaccctcatcccagtcctcgggtgcgactcgctcatagctcttcaagatcggagaagtttgtttcctgcgacaggcggacggcagaacactcttaaagattgacgcaattcccttggtccaattgtatagatgtggggttgagaaacaggatgcggcaacgaagacaacctccacgatgattaaacccgttaggccagtgagcagtgttttgacagcagccttgtcgccgtggaagttgtgcgcttgtttccagtggatctcggctcctgttgcgacgtagaaggagatattggcggctgatagaccggagattgtcaaactacccaagaaattcatttagcgatggtctcactcaaccctatgggaactcgtacctaagtgggaccaccaacaaggccgccatgacacgtgcccatcggcgctggtaatcagcacacaggatgtgagcgaatgatacacacactacatcttgtaagaagaatgtcgggccccagatcatcaattctccgggagataatgagttcagatgcgagtagatgtgaagaatcttggcacagatcacggcgatgaacaacagagagaaccaatacctgcgcgagactggccaacaatgatcgaaccaaaaggttggggagaaagctttgcgtagtatattgcgcgagccatctcgggtcatgaacctagagcccatgttaatttatatatgtagtttgtgccgatctcaggcatgacaatatagagaaaaggtcaccacggtggaagacaatgaacggtaaatacaaggaagagaaggggaaaagaataagaaggccaaatagaacccggcgaaaggggaaattttaacagacagctccgaaccaattccaaaaataaaaatccagtccaatccaacatcacaccgtccgagtctccgattttcccgcactttcaaggcgacagtattccgtagctcttcaggagtgcttcagggtccaccggtctcacgtgggtaggacataagctttggcacttgttccggaatgttcgcctgtttagtcatttctatttctaacactcggaaaccaatcgcatctcgtcaagcggagcttatggtgactagtccagggatacgagggtcaggccgtaacttagtgagctgcgattcccttgcgtgaggtctccttgcgttcagcccgatagttatggcccggacacataactgtgttagcatatgacattgccccagtgaccagtcactaatcgcctcgtagctcgtataaccagtttggttctgctgactcgcttacggattcctccgtatcccgcacaggaggctgagccactgtccaagattctaggctacagcccaaaatataagcaggtttgaaatttgggtgcgttggcagccacgggcttacagatgatctcattgtttttgtgcgagaaaagagctatgtaggcatagcataatggagactttaatcccaagcacatgatgatcatagtttagcttccgtgccgctctggggtacagaagcctgaactttgtagatctgtgcagtctcatgaacaggtgcttgtaataaacgatgttcctcctaggcaacactggcaagatgattcaagggttctcataggttatcacgaatctaattttcatccatctatcttcaggagttcaattctgaaacagcaaggaaaatttggacgccactcataaggagacctaaatagccgaggccccaccaatcataatcctcgggtttccaaatgagagggataatatctctcagcttgtctaatagttctagtagttagttatagggcttagttgactgatttagaaaatcaatagtcaagagtgaacacctcagagttaaagaagattgttagtaagctgactactcggatgttaactaacttgcgggcctaaaacaattagggctgcctattttcgaagatcaccatagaacacatacaataggcaaattccattgaccgttatgatcgagaaccccgtctcaacaacagtatcctatgtatctcatcattcttccctctggttctatagtccccatacatacacccttggtatgtctatcaatatattgaaacttgaaagtgcaatttttgtatagaatatagttgcaggtctagccagtctgtggccattcatttcgacatgtatacaaccccacccctcgagggccaacccgcataatgcacacttccgtcccataattcttggactctctcctggaaaacaaagttgaaaaaaaaatacaagacataatatgtactatatctaggatagttaggtattcgattttataaagcgcattcctaagagtaaatttgcgttgaattcctcactgtgtcctcttccatagtagggacgaagtacgaataaaacaaggctagagaatctcacatgtagccttccagggttggtccactcctgtcaacgtcaacccaatgatcgtcgacgggaacctccgcacgttgtagctaagactgcaccaaccctcattcaggctttaactgtggagcatgacggtgtatgtctctcccattacccaatcccaggtattgaagctgctacaaattgacgggacaaccggctgaagaccattgaatgatgtctgtacattagtacaaagtactaatgcgtatttcaacagcctaacctcttccctttaccccttttcatcatcccgagaggaccccggaccagacaccgaacaatgccgcaaccactagagatcgcagtggtaggttcatctatcagttattctcattgctattctaacaatttataggatcctgacgtctacctccgaccaaactatagcgatgattggcattcgtaaatactcgcatttcccccattcaatgtcatcgacgtctcacacgatatgacatagggagaccacgtctatcggttcctcaatctatcatggcctaatggaaaatggcagacggtatgtttcatcctacatttggcgcacctgggaggtcgacccgttactcatatacttattatctataggtatcaaactctgagcgacagagaatatctgtatgcatgttgcagcatcttccaccaaagaaattgccaacttatgtccgattctcaccagggttccgtccgatgacctagcattcgagtcctatgaagccgggtacgtacgaccaacctttcttacaccatgattatcactgacactctcagtcacttgctcgcgctcgtattagattcggagcgagagaacccgcttttcagagcgcctatcgagaaggaccccaaacatatcctggatatcggaacgggtaagggtaactgggctatgtacgtcaaaagagaaaaaccccctccctcgtcgacaagactcacaccaatataccgcttgtatagtgatgttgccgacatgttcccatctagtgagtgccaatccccgaagctcagcaagacagtgagctaaccccatctagcgactgtgcgaggagtagacctcttcccacccccaatcacatggatgccgccgaactgcatcctagaagtcgacaacatcctagaagaatggacctggagagatcccctcgacctaatccacatgcggatcatgacgggctcattcgatcacgcgggatgggatcacgtttacacaagctcctacaggtaaatgccaacacctaaatatccatatccgcaagcatatgcactaacaccaggactatcgcagaaatctacgaccaggaggctggatcgaacaactcgaaggcagtacatgcatcgactgcatcgacgacagcctgccggcagatagcatcctgcgaacctggggcccgaccacgaacgcgtgcggcgagcgcgccggactcgcgatggatgttctcgatgccatgagcgacagaatggaaaaggccgggtttgtggatttgcaggagaagtcgtacaagtggccgatcggcccgtgggctcgcgagcagaaatataaagaggccggcgttgttaatttccagcattggctttctggtatggaggggtggtgtatgtggctgcttacccatttcggtgcgccgcatccttggtcgaaggatgaggttacggtttttttggcgaaggttcgttcggaacttaagaatccgaaatatcatatttaccagagagcgtgagtttggtcctagccctgtggtgtggtattggggggattgatatgctgatttttgtttagacgacgtgtgtgggcgcgcaagccttttcctggagagcttacgcctgagacgactccgatcaaaagcgaggaagagtgaatgatgtggaatgacagttttcttagcgagtggatataatgataatgtataggaagggaactgaatcaagatctttgaagatgcttacaatggatatttccaatagtctcaaatttgtgatagacaccctaggagaaaacgctactatacagcaccgggtgagggtcaaggcggtttaagcctatgatgctgatcttaaaagctataatagtcgagggtgctccacaaatatatctacaaggcgaaaatcgcaagtgtagcaatgttaatcatgtttcattggacaatgtcgtaagctagctaattgcgacaaatggctcgtcattgcgcttttcataacataaaatcattgaaactattctagttccaaattcgccaactgcgatgaaaagttccgtcgaagccaatccatgtatgttttccacttagaaagatcgcctgatgcctccgggccggggaacgccttgctcagctctcgggtaatctttagaattccgagggatgcctcctgggccttctccaactcttgcttgacggcgttgtcctttggcttgaaggaaagcacagtagtgtaatgctccgacaaagcgtctaggtgccgctcagtatcctccggtgcgatcttaatcagtttggaggtcatgagattgctgattgcacggatgtcctgctcgtcatcgagaccagcgaggatgcggtcaaatagttcggccgtatgggtacgggagaaggaggtgtcgagcgaggcataaagggtttcgtaggcactctgtaaataatgatgttagtggaatctagggtaaatagtaagagacactgacctttcgcaaatcgagcccatcatccactttgtgtttgaatggacccatttgcacctcgcgaatgagctctggcttgattttggtgtcaccaagaacagccggaagaagctcatctaggtgagggagcagaagatccatcttgttatggattgcagagttgagagtggtcaacgcaagccggtggttgcccaaatcactgtcgctgagcatgttggtcaaaaggggcaccatcaacggtcgcagcacatcattgtaagcatcgctcgaatcggcaagcgtgtaacggaatgccgaaatcaccacgccacgaacagccgggtcggcattggctaggtactcctatgggcatgaggttagtattagaaacgtagcgcgatgggcacgacttacttggaagtgggggatgtaagcaacggggtcaaggagtgccaagcgaccgacacattcagccccaacagcgcggttgtcttcctgttcggagacgacaaggagggcgtgccacaatttgtgagcggatggtgcaagatccggacgtacgacctctggatgctgaagtaattcgcgtaccgaatggagaagcaaatagctttgagcatttaatttctccaacccattcaaaatgattgggagataagctttgacgctacctgcggccgcgttgccaagagcagtcgcggcagccaagcgcacgtgatctgactgagattcaaaatgaggaatgaagagacttggagtcaacgggcactcggggcccattcgcaggccgatttcgcctagtatagcaagggcaaggcattttcggctaacatcccgtgcagtcttgagttctgttgagaaatcttccattgtgactccaagattcggtccaccgtggaccagaagggtgccaacagctcttccgaccactgacgagtcccctgtaattcccacgtcacggagaagattctgcatcaaactagcacctgcaccttcgtcgccaatgactttgaccagcagaagcaacgccttgagaacagttccgatgagtggtttggtcacaatcgagcagatagcagagatcaaaccgctggtcaccattagttttgcattgccagggacaagtttggcaataatgatcaacgtgggtgtaagtgtgtggaaatcagctgcagcgagaagaggcaaagcagcattctccagtgctgtgattgtctcaggggtgaggtgagatctgatgttagaattcatggaaagactgcggagagtttccaagcacgcgcctctcaaggcacgatcggatttgcgcaagttcgaccctagctcaagggcgacattgttgacccaatcactagaaacatcctgtttgcggctagcgagaacgacaacatcatcaatcgcacggacagcggacaaacgagttgtctcattcttcactcggtcgaccaaaacagccagaccattagatctcctctcagatgaaaggaactctgcaccccgatcgcctgaagtgcgtgcgaggatgacaccaaacacatgaattgctcgttgccggacttcgagatcagcgctggtgtcggtgattcgagagtggacaacatcataaagcttctgcaactgcaaagtaacatcggaaggattggcagatacgcggggcggcgtcattgcttttataatttgctccacagcccccaaagcctcgctgctgactttgtagttgcggtcgttgacagctccgatcactccaggcaccagggcaatcaggaatggcaatagcgcgtcggagagatgggtctcggcaatcactgaaatgagacccagcgtttcgatttggagggtacctgcactgacggcagccccggtatgagccgctgtgctccctgagagggatgaggtcttgagggcatccgcaataaggtcttcaatttgttggagatggtctgcaagaccaccatagcgaaccaacgaaaggcttttgaggagaatcatcacagcttgtttgagaggaaccgaagcctgcttccaagctttgacaaggttctgcacaattaaaggcacagagcgagctagatcagcctgagaaccagacttgggggacgatggcacagcaggagaatccattgcggacgaggttccagcactcggctcgaagtcaatcattgacgcatcactgtcttggcgtctacgcttgcgagaattcttcgagccaccaacggcctccaggaagtcgttggatgtgacgatcatggatccctcgccagtcttccgaacaagcgccgtcaatgtcgacaccacctcaagcttcacactctcttctctctctttgctaatttgggagattagagctggggcaatctgctgaaacaaggccgaggagtcggaagcgcgaccaagcccgtaggccgagatgacggtgtaaagaagcttggcagcacaccggcgtaccttccagctcatgtcgtcgatatcactgtagccgccttcttcttcaaagtcctcgaattcgtcgtcgtcttccaggtcaggctcttctgtggcatcatcgtcctcactgccatcatcttgggtgcctcccatctcctcatcgtcctccacttcagcgacgtttggatcatattttaaaaatcgaagagctgatcgagtagtgttggttaggtacggttgcatctttttgttgcaggagctgatcaacgcctcgagcgtgaccaaggcagtctcgcggagctcgtccgcctgaggatcatgttcatcgtctgaataggatgacattgtcgcgatgatgaaatcacagaatatgtagtttttttgtgaaaataggaaagcgaaattgcgtgggctttgcgacacacgcgctggagaggtgtgtggtgttggggtcaccgtcatgagcctagagttgcaggcaagctagctgccccgcgctagtcccgatatggcaacaaactcacgtgcacgacctctactgcaaaaagtcaagcagatcaagtgatggttgggcacgttgtttggaagctagaagagcttgaagaccaccttgctttcttgctttagcccttttcttgctgctctggttgtcacctgccttgggatctgttgaggccggtgttgaaccttgcacgtcaaccctcataggagttgaccctcgcgtggtgactgtagctgctctagacgaaggttttgagatatgatttctcgaattcctttgaggtagtactgtccgctggcagcagcgtagacacttgtagactgtagcacctgtagatgccgatccagaggctaaaggcttgctttttttcggcttgatctcagtaactttactccactggggctttctaatgctaccacacgccccacagtgatctctcttctgctgggcatttaatgacttagactcctcgtggagaagccgggtgtgcaccgctagcagatgagccgatgtcgacgaaccgagggggacagccgagacagcctgaatgagaaaggaaggatcaatgtgagacattgtgtggccttgcctattgaggaataaagattcgtattgagaaatcaaacaattgtcagctcaatagcaaagacaatagaggcaaacgaagaacaatggagacaaacagaagacaatagcccgatgtttgctattcagagatttgccgcgcgggagcttaaaagccccaagctccacccgccgcttcttcccatctacatctctctgctctctaccctttccatctgctatccttcttttcttgcttttcatctttcgttttctttcctgcagtcttcatcggctttctagcaagggcttgcattcgatttttccttttccgacagcctcattccggggattttcttatttttcgcgctatcaaaatcccacagctcagtcagatcatccacgatgccacctgtgcgaattgccgtggaaggctgtgtaagtgatattgcatgactgcagatcccccatatcatgtgacatatccacttcgcagctggttgctaatcattctgtatagggtcatggtagcctcaatgacatttatgagactgtggatcgccaagccaccgagaaaggttgggactctgttgaccttgttatcattggtggggatttccaggtgagttccttgtcatgtccgattccacactagctcaacgttaactggtcaaaccaggctctgcgtaatgccaatgatgcgacttgtctctcggttccagacaagttcaagcaaatcggcgattttcatgagtactacagtggtggccgtgttgctccctatctgacattgttcatcggtggcaaccatgaggcgagcaatcacctcgccgagctctattacggcggttgggtggcccccaacatctacttcatgggtgcagccaacatcatccgctttggacctctccgaatctcggggatgtctggcatctggaagggttacgactaccggaagacccactacgaacgattgccatacaacagagatgacgtttcttccgtctaccatatccgggagctggatgtccgcaagttgctgcaagtgcgcacccagatcgacatcggtctctcccatgattggccaaagggggtcgaaaagcttggggaccatgcaacactgtttcgcaagaagtcaggcttcaaagccgattctgattcaggaaagctcggaagcatcgcggcacgcgaagctctcaatcacctgcgccctgcctattggctttcagctcatctgcatgtgcgttacactgcaaaggtgtcccatgatccacctcgcgcaaattccatttctttgagtccccccagtcctcatcttgctgtggccgatacccatgctgtgggcgattcaaatgctgtgtccgatacaaatgctgtggccgatacaaatgccgttgacgatacaaatcatgccactgtgatcccacggagtaatgtcaacaccaacacccttgctggccaccaattgcttggtactgccactggagacgaacagtctcgcatcaaagcctggaacgaattcggagttaacgctcgacgagctgagaaggagaagcgagaccaagacgattttatgcgtatgatcagagcgagaaagccgaaacctccccgaaacattacgtttgaagaaacggtcaagattgggcgcggtcccgttcagacgttcgtacgtggcgccgatggagaaaaaatcgaacccgccccagccgacgatgagagcatcgaaaacctcgacaaagtcagccagggaaacagccctgtgaatatttcttccgaggaggccgttgccaagcagggatcttcgctgcttgctgagaccaccgaagatgtccagacagccaagcatgtcaagacaatgcaggatgtcaagactactgacgtcgctgacaatattgataagatcagcatctctaccagtcccagcagcaccgcgagcgttaaatcttctccagctcagaaggctcttccaaaagccgatatctctctcaattggggtggtgatccctctcctgattcctggtggaatgatgatgtgggtgatcgcgttcctgaagtggaagccgaacttccgagcagccttgcgcagtcgtttgtacccaaagctgccacaaataactcaacttccgaacgccttccacctcccgagatgatcaaaaatcttgagactcagttcctgaccttggataagccacacaatcatgatgcctttgtcgaactgttggagattgagccaatttccgaacaggatgatgccccagtggagtctcccctacgactcaagtacgacaaggagtggctggccattactcgtgcatttgccgatgagctcgagtttggtggacaccccaagggcaaggtccctgcccacaagggatttgaatactaccaacagcgtatcgccgaggaggagaaatgggtacaggagaacgttgtcaacgctgggttgttgaacgttcccactgacttcgtcctgactgcccccgtctatgaccccaatgtttcgatcaatacccaagagcagccgaaggagtacaccaacccacagacctctgccttctgcaatctgattgggatcgaaaacaagtttgacatggccgaggaagagcgtcaggctcgcatggcggccggcccacgccccgaagaacctcgtcagtacactggtcgtggtggacgaggtggtcgtggcggccgtggcggtcgtggtcgtggtcgcggcggccgtggttctggacgcggtggttatggtggtcgtggtgggcgtggcagcactgatgcctggtaatttgatcggtgctttcgcgtttctgttggcggcttgacgatttcgaacgggggaagtaggaatttttgaagttagaatatctttaccaatttcttttgttttactctccccatgtatgtatgtctacgaaattatgaaaccatacagtgatcacctagtttcgacttggatttctgcatatttgtgacacgccagaatttctcggttagcctgtgctctactggcatgtgctatgtatcctagggcaaagtttcccgccactctctccatccgttcagtgttaagccataaatctgtcttcttttcacttggaagtgtctagatgtatatttatcaaatgcatatatgcttttcgttgcatttgacctttcccaagagtcttcgttcttcgtgtttccgcctccgctgtgttaaaatctttttttgttcgaggcttttattcaaagatgaagatagatgaagaagctgatcaagtccgccaacaacctaatactctcattgaaatggtaatcaacaaccacttcagcttccaccaattggttgtgaccttgtaagattaaaaaaaaaagatgtgcatcatccgtgaatcgaacacgggcctcgtcgatggcaacgacgaattctaccactagaccaatgatgctgaggcaccagacgattctgagagctgattcgttgatgatatctggtggtccctgttatcgtctttgaggcatctctgaagttctagatctttgaaatccaactggtcatttttccaaagatacctactattatttgatatttgatggattggaataatgatttgcgagaaatggtaattattcgtcacatggtatcggagcagttggcttcattcaatctcctcgatgcgtggatgtccggtgctttcccattccatgggatcaacctgtagaccggcgatcctgtcacccagcccaaattgtggattgaagccatcttgaccatcctggatctgagcgccaatgccccacatcaaggacttctccgaccaagcttccaagctttcaatcaaggcgcgcagatttccacgagcgagcccgtcctcctcacgaccctcgacgaagcggagagttcgtagcatggcagggatgttaccaatggttgactgtccctgcatacttgaaccacgtggagccgaaaaactggaagccgagtcgtcaaaaagagaaaagccaaacccgatgtcccggtttccgcgtctctcccgcgctgcctcgagagctttgagaatgtcgaagagtagaatgatactcgcccggcgcaggatagcactctctggttcagtctcgagagttagggtagcaagcgcgagttcgacggcggaagaaagaatgactgggccaagaccgaggatattgacgttgatggctgatccaagaatggaaatggccgatgcccggatgcgaaggtcatcaggagcatcatctgcggatgcaccggcagcccatgcagcaaccacgtttgtagcgtacgccgattgctctggggattcgtcgtctaaatgaagttctgagaggtcaagctcggaagcagcgttggctactcctgatgaaatggaccagccttccggcatagctggctcttttgccttgcgctgtgcgcgttcttgttcctgtctctctttggcgagtttttccttgcggatttgctgtgcatgttgcttgttgccacgccgtcctgcaacggcaatgataccctctccaagaattttggccgtatcaccgaccagtgcgtctcctaattcctggactgttcgcagcagacactcaccaatcctgagtctttcgtccaaggctcgttgctcgcgtctatctgcgtactcttcaaccaaggttttgatcacggtacgtgggtgacgtgatgctagtgtaccaactatcttaattgcaccgaggtatgcgtattcctcgttggcagcggttttagatgtgtcggtgatgagggagagaaggagtgtgagggtcgagcccacatcaataacaggtgatgagttcatgatcagtttcgaaatcagcgataggccctccgcctgcacgggtggtaggtctgagttgagattggcaagcgcctgacgatgcgtgtcaaggtcctgaacatgagctggtactgccttgattgtggtttcatcggtagcggcaaggtgaatctccaacaacatagacgaggtcgttgctgctttggagaggatagtgggtagaaacggaataagttgatcgaggtcctttttcaaagctccaaggaggggttggatttcggcagtgggagagaactcggcggatgcaagaagtgtggacatcaaactaaaggctgtcgaaacggactcaaaggagtcgttgcttaactcatccctgtcgttgtccttggtttccacaatattagccagagatgacagggataccttgctatttacgcctcgcatcgctgtttcttgggcgctaaatctatgtagctccccatcaataacctgcttgatgagctctaaaactcggagcgggcgtcgagtgagtgcttctttgaagttctcaagcagcttctctgcaaccttggcactgacaagcctctgtatgatgttgtcactctcatcaacgggacctccgttcagtgtcttgcgagggggtgcggaaccttggggatgcaccagccagttttgactgacatagaggaatatatcccccgtccgttcctcactgctaggatccgagccgatgagactgacgaaaatatctgctcgtccttggagggaatcgatcaatcgcaccagatttgaatgctcattcgttttctcactccgcttcttcaatgcgaccccagcgtcggaatttttcacgtatgtccacgtcgagcctccatcccaaagcagattatcaaccagctttttgaggggttgggcaccaacagagataccaaaatatgtttgtagcagaggcaatacccttccatggaatgaggtcagctcttcctcctgagagaaacaaactaagccccatagtggaagaataatcggatagacgattcgtttcacgagaccggggtttggatgctgcaatgtcagacacctcagtctgcttatagccaggtccactgtggcgccatccaccaagacattggatgcgggatttggtgccacggaatttggaaaagagccttcaatatcggtaaaacgggtgatccatcgccttgatttagcgtcaagattcgcggtaagtgcattgaatataggctctataaagatggagtggccgacagtaccaggagcaccataagcccgtttccccaaaattccattaccgacaacgtaggatgcagtttgcctcagatccggatcatcgccgtctatcaatgctagcagttggggagcaattgtctcaaaatagacagttgggtcaacatcagatggcacagaagaaaggagtcgtgagatttgcatgatcgcctgcacagtcaaacgagggccatgtgactggtcctgtgcttcctggcctagcgatggggaaaactgcgacgcaatgaacatgatggtttgcactactccaccgggtcgtagcggaacttgcgcgatctggctggagatagtggacttgaaccatggtgcagtatctgactggaggaacgcggacagcgtaggtagcaacacagtggttggggtactgtaggctgttagtattacttagaaatagtaaaagcaaggggaacgtactcatcaattattttggccaacgttttctgatacttagtccggtcgaatgatgccgtggtatttggattgaaagccagatcggccgtgccactgattatatcactcaatatacgaccacgaatgatcggctggaggcttggtcttgggtcgaaaagaacgtcaaccaaaacgtcgattatgcggcgcaaaagaggctcatcgtgcggtacactactagcagatgcttgagcctgcttcgcaatgacaccagctggtaataccgatatcacacgctgctgcagggggatcccaacgccagatgatagcgaaggatatattccttccagagaaaccaggtccagtaatgcatgtagcatccgacgacgcttggcatcttctgctggtgagtcttcaacctccccgcaggatttgagtgacccaaattggtcctcaggtgatacaaatgatttatggatactggtcaaaatatccaaagccctattgatcaccgctggtctcgcggcatcatcaccctccgaatcccgactgaggatctgcaacaaggatttgccttgggtcttctttatttcctcttgaagatatagttagcgctcgacctagatgtagcttgacatctcaaaggtccatacctcgatcgagaactggggtcagaaagttcttagcaatgccaaacgcgtcgcgaagttgctgttcatctcccatcataaataattgtaggatactatcatgctgaattcacgccaatgaaggtattttcctcatcgacattgtccggttccaaggttcgaaaagtaaatgaaatcaccacgaacaattgcggtcttggcgtttgtggctgattatgtcatagcagataaacccgtgactgtggtaatcacgtgatagtcgcgtcagtggcccgcgcttgcccgcattggtattgtcgcgtcaactgagatacgttgttgttgtcaccaactccgtctacttctatccactgctcatttcacaatttcaattgacaatgttagaccgatgtggacagttctccagctaccccggatcttgcttgttcccacgacattcattggaccccattctcgttcaaacctgccacagttccaccgcgaccgtttcctgagtgtggagccactcgagtctcttgccttacaaggcacacatatacagatcaaccctctcagatcttcattttcctctgctgccttaaatggtgaaccgtcacgtatatctcgccttcggtgactcatattgtttcggtgcaaaagatattgaagtcaaccccaagcctctctcggttcaatgtccacagcgacacagtttcacggattgcgcatgccggataatacgattagccgaaacagactgtgatggtccgattaagcgaaagatattcgaatcagccagagccttagggcacaaaagacggtttactatgcgttatccaaatggagagcgcgtcggtttaccaatgctggacgctgcatgccggtcacaaacggatggtcgccctatgcctcggatgtcagttcaacgagaagagaacgtgggtgaagcatgtcgggtacttcggtatcagatgttaccttgaggagcaaccacgacagcgcgaccagatggcgattgaatacgacattcaagtctcgaatatcctagggcgtcaaattgtttggctcagatatttgttgcctagaacacagcagtatccttacacacagtcatagtgtcagcatatccaaagaatccactcgccggaatcaacattcctctccctgaaaattgcccaggcattttcacagttgaagttgtcgcgaggtcctttggttatgctgccctatgattcttcaatgttggccctaggagcacatagaagattgcgaactgttgtctcgttccagatggcaataaatttccccaaacaatttggtgtttttcggacttgtttgtctgtactctatcgtcaattctgcgatcatcagctgtctgctcctgcacatgtttcctattccaggatccctgggggtcttgcccctgcgttccaccttcttgggttctgttactcctacgccccacaggcggctaggcacctcgtatcacggcacccgccactgattcgacttcgtcagaagatctcgaccgaccgtgttagccatctcttcgcaaagtagtttgtggatagatcgatgggcgccgatctcaacaatgacttccaccattgttccttccctagggaagaaggaagcgatttttctggatgttctttgtccgcttcacaatatgccctcccgcgacaccctcgcgtctaccgggagaggaaacaaaaacctgtcccagagggtactgtaccacacacgggagactcggcttcatgctcttgcgacggtatcggtgaaacaatggcgatttgactaaacgtgcggagatgggtggccgtcaagcagatttggttgagtttactgtgtctcatccaagtttggcttgtctttgtgaaatttgtgtgagctctggtgagtttgagggatatgttcatcggtgtcgtctgctcccagacattcctcagctcccatttgcgccaatctttgatgctcgccttgatatctctcgattgatgacaatttttctggtcggagcaacgtacggtttctatcgttcgaacgctttaactcatcagcccatttacagtcggcatgggggatgtccttggtcggggttctaacctgtatgcgtcatgcagtaggtgtcgtgggacctctctcgagtgaggatcaaagctttggcttgtctacgatgcttatctgctgccatgcgtcccgactaaggctcgtctctaatgtctggttgtaatgaactgaaaagcgacgaattggaaatcgggggatctctataccgcgaatgaactattgtttggtcattgggacttgggcgttgtgtcaatgatggttttttctttccatgggagcagaatgtttggccaggcgatagccggtggactgccgtttctactatcctttggtggtagaagcggccactttttttttataagtacccccaaatcctctaattccaaggtgatgctaactacttatatttgcagattctggtgcttggtggatatgacaggaaattaaacaataagaatgttagctaacacaatggacaatgcacgttgtacacctgcccatggatccatgtagatatcaatgacgtcactacatcatgccatcctcaccgcccttcaaatagaaggcggtgacatatgtcatggcagaaatgtaatacatcatcccactctttgtcagccccacctgccccgcgcagaataggaaggaatgttcccgtggctccgatatttttttggcgataagaatttcttgcttggatccaacttgctttactataacttccctcgcatttccctctttacacagatattttctatcccactacacattatttctcatttctctttacacaaatcatatacaatggtcaccgtctccaaagccgacaatgatgcccttgaggcacagttcgagtcgcaattccaaaagcccggcgatcttgtggagcgtgatgatgacaccggtgcgatgtcaattgaatcactctgcatgaactgccacgagcaagggttcgtttctgatattcgattatgttttgcacattgctaaccttccactttaattagagtcacgcgcttgctcttgcttcgagtcccttacttcagagacattatcctggagagtttcgaatgtgaacattgccactttaaaaacaactcgatcaaatccgccggccagattcaggagcgtggaacagtctacactttgagggtcgagaatgaggaggatcttcaggtatctatctccagctataattcgttttctcctgctcaagctaattggatatttagcgccaagtcatccggagtgatgtttcaggattcaaacttaccactaaggaaggcaaagagattgaagttcccaagggaacaggccagctgaccaatgtggaaggcagtatgtgaagcccaatgcaatatagttcgatcccaagacgctaaccgtatctagtggttcaactcattcatgaaaatttgtcaggagagcaagatctccgtaaggagcaagctcctgaactttacaatgcccttgtgcctgttatcgccagtcttgagaagatcatgaaacgcgaggacgctttccccttcaccatcacgctagatgacctcactggaaattcgtggattgcacctaacgccaatgatcgtggcaacaagtacaagcgccatgaatacccgcgtacccacgaacagaacgaggagttgggaatctccgctgacgaaaacgctgtcaacaaagaagacacagctgaagtgggcgccggcgacccagatgatctcgatatcgttgatggccaggtctacagcatccctgccgagtgccccggctgtaataagcaagccgaggtgaacattaagaaagtcaacattccttacttcaaggaagtcctgctgttcggcacgaactgtgatcactgcggctacaaatcttccgcaattaagaccggtggcgaggtacccgagaagggcagacgtatcactctcgaagtgaagaacgaggttgatctctcgcgcgacattctcaagagtgacagcgcaggactttacagtcccgaactcgacctagacgttcagccaggaacgctcggtggacgtttcaccaccgttgaaggattactaggttcgttccccttatttgattatattgacccagctaaccctttatatagttgagatccgggatcagttaaagggtgccattttcgatgttgacgattccgcacactccggaggtgacagcatggtctcttccgataaggataaatggcaaagattcttcagtcgtctcgaccaggctatcaacggcgagctcaaattcactattactttgcaagacccgatggcctcgtcttacgtccaagacctttgcagtccagctgccgaccctcagatcaccattgaggactacacccgctctgccgaagaggaagatgatctaggtctgacacacatgaagaccgagggttatgaggaggctgaggccgaagccgccaaggctaaggccgatgccgccaaggccgatgccaccacgaccgatgctactcagaaagagtagtcgaaggattacgatgtaatatccatttcatgaaactcgcgatgatctgattcttttgggattcttgcataacggcgtctgtgatatgtacttttttgctggggtaattagatatttggtcatacatagggatgaagtcataaaagttattttactgtctacttacttcatcatgcatttcttcccagtaaaactgttaataggagaggcctaccgagagagggggtcactttgaagtgtggattgaattgttgaagctaaactagagctgacatggtagaatctctctgtatctactgatcatatctaattttgcaattcattctctaaacggtgtacaatgcactaacacgaaacacatttctcgaatcttctcgcaagcaccaggcacttcatatccacgaagcgattccaaagttcagatgccaccaccataacagcacctaaaacgatcatggttcccatccaagtcatagcaaacgatagagcatgcttgctcgcctcgatagtaccaggataaggcgttcttgtaactgcccaccacaaaaagtctcgcaccggccatttaagagcgagatagactgtcgggtggactagatagagcggaaatgagatcttgcccaagtattgcagtggccgggagttaagtggcctttgaagcagcgcagatttgctaattgcatatatcaccagaacagctcccacgctcctccagcaccggggcatcatctcagcattatcccactcgggagatcgagccacggccagccatcggtattcagctgctaaccggtcagcaccgcacatgcaaaggaaatacatccctagaatgaaagagactgatattccaatccgttggagatagattttctctgtgaatttgttccaggctttggtaatgggctcttgaatctcgagaggtgaagatgaatacgataatgcaatctctctgtctggtccggactctgacgcgacgtgtctctccgcaagaagaatcccagcaacgaaagcgaagaggtcccaatgtcccatataaaaccaatacatcgccacgcctaccaatgccagataccgaggctggggcttccaaaacgagaacgtcaagatcaacaagtagacagcacacgagccacgaaactcaattggcatcgtccacagctggtagtttatagtcctcatatccggtcgattgcgatcaaaattgatatcgacttgatggttgctgatatccagcagatgcactattctcgaaagcacatattggacgtgagcccaaggcgccgtcaagggctttagcccgcctagccagtcatccgcagctttccacgggaacacattgcagaagtacacaagttggcttaaaaatagtatggcgatagacggcagataaattcgaaagattcggcgagttgcagcagagcataatcgacgaaagaatccgacattactcgccccaacgtcctcgcgacatcgcagaagcggaagagagatcgcgtagcccgatataaccatgaacagggctaccattgacgggccattgaagagaagtcggaagggcggaagttggattagacgatggttttcttcggccggttcgtcccagtaggaccttgtcaaaaagccgacgatactcttaggctccgagctctttgaatggtgtattactaccagagctgaggctatgccccggaggctatcaagccaaagaatgcgccccatgctaggaaagtaatttgtacagaaaggagagaaagtcaacgagggctgatgctttgttgaatagtataataacttcggtaacttgtatagaattagattacagaaaggtacttttgtctggaacttgacctataaacttagtcttcaagctagtaacactagtaaaaaaaaaactcgagatcgatacagctgatcgcgtctgtaatacaggtggcaatgaaaccctgcaagacgacgatgcacgatataaatagggttcatcctcgtccctaagaggttatatatacggggtacatgcaggagccatcacaatatgataggtaaactgtgagatcccaaaaacaaaaagcaattggtcgatgaccccaaaaatgatattatcgtgtgaccccctgcagatccctagacttacgcctaactatgaattcattggtcgcattggacacaagtattccgtccgattttcaattttcaattttctacaaagtagatcgtgatcgttactcggatctgttcggctttagaatcactgggcgaatttcacgttcagatggttccaattcgttaaatattaggattaagccaactttttcctagcagtacccaatataactttttccttgaacaagaaatctgcagagttgactttctccacaagtaaggcagctctatatgcatagtgcccaaatctatatcttgcctgacaaggcattcaagcccacagattcggtctgtgcacgaatctgcttctgccacatagctttatatcgaccattagcagccagaagttgctcatgggtcccagtctctgcaacccgaccttcgtgcaatacaacaatgttatcagcagtggtgatggtgctcagccgatgggcaattactagcactgtgcgcccacgtgacaggatggctagtgcttcttgaatgttctgctccgtctcggaatctaatgcggccgttgcctcatcaagcaggatgatctgaggtttcttgataatggttcgggcaatggcgacgcgctgtttctcaccaccacttagtcgtaatccacgatctcccactttggtttcgtaaccgtcggggaacgccatgatcttgtcgtgtacactggctgcacggcaggcctcgtagacttcctcgtcggtggcgttttggttggcatatttgaggttgtacatgattgtttcgttgaagagaacggtgtcttgtgggacgacgccaatgtgtctgcgtaccgaatcaattgtcaaggtctgcgtatcgtatccgtcaataagaagatttccgctgctcggattgtagaacctatagagcaagcggaagattgtcgatttcccgccacctgattctcctaccagagctgtagttgtacccggtttacagtcaaaggtcaatccgttgagagcaggtcgtcgggtgtcatacgagaatttgatctcgttaaatgtgattcggccgtgacagactgctagcggtgttgcagacggtgcatccactaccgatggctggacgcggaaaagctcgagtagacgctctgcgttgatcaacgctgattgaatgtaccggtagaaggttccgaagatgttcaatggggcttgcagttgggccatgtaggtaaggagcgtcacgaactggccgactggacgttgaccacgagcaacttggtaggcacaaataaaacaggtgatgagaaggccaaacatgaaaatgacattctggcaaatattcatcagattctgtgcgaatagggaatgccattccgcacggaggtagtctgagaccgctcctcgatagcgattgaactcgtattcctctgcgttgaagtatttgacagtttcgtaggacacaagggaatcattcctgtgtaggttagtaaagcgtaatgagataaacagagacgtaatacaaacttacttgacagcgtcttcctgtctggaagcgttcaccatttgacgtcgcatattggccctccaagaggcaatcttgatggttgaatagaggtagaagaatgtcatgacagcaacagccaacgcgtagtacacgtcaaatacgattagaaaataaccaatggcgatggtcaaatcaatgaacatcggcaacacttgaaatgtcacttgctcaagaaaagtgttgattgagttgcctttggtgagggcagagagaacctcgcccatctttttacccaggtgaaagtccagtcctaggttatgaacatgctcaaatgaagcggttgacaactccatgtatgcatactggctcactgagatccacagattcgagcgaaccgactcaaggaaaccttgactaccttgaagccaacggtagatgatatacagacagatgggcatccaaggcactttcagatttccatcgctggtggacaatgagtctgcgatcactcccacttgatatgggactaggatatttaccgctcgctgcacaatcaatatagcaaagcacatgacgacgacaatttgcaaccggagagacttgtaaggccacagatatggaaagaatagggaatagccactcagatattccatccagttggtggaaggggtcgtcaaaggccgcacccatgcttctacttccggggtctgttgaccatcggtcaaggcatcaccatcatccgagttggcattgcctcttgaatctagcaggctagtcgtctctccggcatcggcatcctcagcctccttgaatgcgcaatgtttgcgggcagatttgaaaatgtaggacgcgaccagcagtgtgagaacaaaaatccgcactgaacctgcggaaatctccaatgcctcccaaaatgtgatctttgtacgcaatcttccaccgaatggatcttcgattgtaggttcatggtggatgtgggaatagattgagattgaagttgagagaatggctatctcgaagggaatggccgagagccatgggacgaattgcgcgattgacggtccacggttctcgagtaaagagatgaagataacggtatgagtgaagaaagccccaacgacaaagaactaggtttaattagctttgctttcaattttggaaacaggtatcgcaccactaccgcttgaccacaccaccactgctctgactttgaaactatggcatgggtcatatgaattgctgcctcagcaatataggttgccagcacaaacagatccagccaaacaaaccagcccttggatctattccgcgcaagctccgcgggcaagtccctggccaccgccatcatcattcgggttcgcctaggcagtggtttcccattggggccatactggactttaatgttgcgatcagcatttctggccacctgagaggaatggaccaaaaagacgataaagataaaccctagcaaaatcggagggtatccaaagcgaagatattgaagcaattcttgggcaacgatagccgaatccatggctgcaggcttataatcaaagactctctcaaagtggctttgaccgggcaagacgggaagagtgggaattgcccgggaaagtatgtgattgtcttcacatgcgaggagttggctgcgagatcgcaagctgaaagttcacaattgagctgtcgtgcgctcacattttagttgcgacggtgctgtcaatcagtggagctcggagggacactagtaacgccactgtattggctagtaatctttgcttccaagattgtgttacccatcgatgcatgtctgacctgaagatcggggtcagtgacttgtgtatactccagacagacgctattatctagtatatagacaagtatagagtacagggtatgtacttgacctcgtaccgaatatgtatgtactggatttccgcccttctggaccttctccttcctttttggtcgttgtctcttaccgctcttttatcaagggctgagcaggatgcttacataattcacatacttcgccgttcaaggttcgctcaccgacaccagcatcacctgactatcacctgaccacttgcctatttaagtgccctgattcgcccattgagcaggagctgagcggctgggtgctgcgtacgtcaatctccctgggacgatccgggtaggccgctgaaggtcaagttaaggtggctggacctcatactcagcctcccatcgccgataccatgagagctttggtggccatccagctaggtttgctccctatgttgcccgttggaatgcagactgtatatatgcattgcatagggatattgaaattgttcatttaatttctcggctaatatatctcatcattacttgttcatggtaaactatacagtaatatatccaccatcaactaccatagcatgaccctgtacaaaagaggcctgcgtggagcataagaaaaggattgcatcggcgacctctgctggctgacccattctcttcataggggctatctccgctgctggagtgatggccgcgcgaatctcgggattctccatgatgagtggtgtttcaatgacacctggacagacacagttgactcgaatcccattcttggaataatcgataccatctgcccgagtcattccaatgaccgcggattttgatgcacaatacgcagctagaacactgtcaatcgtgggtttaaatggacagcagcgcagaacttacgagcacctggacggctaacgattcccaactgactagcaacgttcacaactgcgccccgctggccaggacggttagggtcgtgacttgggagttcactttgagacaccatctgtctaagctctgctcgagaagacagccagcagcctcggtagttgatattgttgacccggtcaaattcttcgaggctcgtttccgctgagcgcaatgacttcccaaggacacctgcacagttgacagcatagtcgactcgtccgaattgttgtacgactgcgtcaataaacgagtctgcgaactggtcatctgccacattcccagctttcactaggagttgagtcttggggtatgtagaagcaatggcttttgcggttgtctgcaaagacttttcgtttagatctgtgatagcaattctctcacatcctgctgcggcaaaggctttggctgttgcagcgccgattcctagatcatgttggtgatatatccacaacggtcggctatgctacgtacctgttccaccagcaccagtaatgactgccacgccaggaaacatattgtatgccatgactgatcaaagttaattatcaaatcattaaactggcaagtcaatccagtcaagaagtcgaagtatagcatcgaaactaccccaactcggaatcccacctttatcgcttatcacgggccgaactgttccgaaagtaccccgagttggagtagttggagtcaattctcctatctcgacatcgttaactatatgaatgtactagttatgtacatactatgtactatgtaacatgtagttaactacagagtatattgatccatctgataatatccatcttgaatagtattgttagtatgtccgttgaaattctccattttgtattttagttggagagcatgcatgtgttgtgctgtgttatatcctactataacttacatgtagttatgtttttcaacaacttgtacctcatcttatcgcataatctatctccaattttgccagacttaccccaaacccatatccacatgccaacctcacccctatgatattcaatccctcgtggtttcgtggggaaagtggaccagacccattccgtcttatcgcgcgttagtgtgcaatagctgtgaccaaagtactgtgaacgtccggataaattccagggtgccaagccatacataagcctgaggaaaaacagagataagtgccctcctcagcacttgtctatatataccgaccgtgggtcccccagttcagagctccctgttcactgcctatatttacatctgattggaaaccttctcatcctcgttcaacatggcaattcatacagatgagatcaaggaaacctctccctacccagacgaccccaaagccgtcgagacacaagaaggcgaagtcgacgacaaattcgaagtcttcaaacggggcgagggccaagtcgattttcgaactgtcagttggattcgggcttcaattatctttctgaagagtcagtttagtccggtctcactattgcttctgtgaaaactgacaccgtaatagtcatcttcgcaaccggcgtcctctccatcccatcattgatgtatgagctaggggcattccctggcgccgtttccgtgatagcttggactgtactcaatgcctattgcgctattgtgcagggtaacttccgcaatgcctacccgggctgccattccatcgtggacatggcccaggtggtcggtggaccgatcgtgagggagcttgttggcttcttgttcacggttagttatattattgtcgcggcatcgggtgtcattggcgtatcgaccgcattcaatgccctgtcacggcattccatctgtaccgtttggttctcgttcatcgcgatgattatcattaccatgtgtgctagtgtgcgcaaattctcgcatattggctggctcacctgggttggatttggcagtgtctatgttgccgtttttatcattgtgtaagctttggccacttttcgtctctcggaccaagtactaatggctctagtatcggcgtaacaacacgagaccgaccagcagcagcgccccaaacaggtgacttcgacctcggctaccgagtcatcggtgaccccaacttcacaaccggcatcacagcctcggcaacgatcttcgtctccagtgcagccacatccgccttcctcccggtcatttcggagatgcgcaggccaaaggattaccccaaagcagtctacctaagcatgagcctggtgacagcctcttacctgactttcagcctggtaatctacgcctggtgcggcaagtggatcgcctccccatcacttggtagcgccggcgaaaccgtcaagcgggtcgcctacggcatcgccctcccgggcctgattgtcagcggctgtctctacgtacacgtcgcagccaagtacctcttcgtgcgaatcctgcgcaactcgcgtcatctgcaagcgaacacggccgtgcattggtgcacttggctgtcgtgtacgattggtatgtcggctatttcgtttgttttggcgtgcgctatccccatcttcaactatgtgttggcattggtgggcagtttgtgcttcgcgcctttggcgattagtctgcccgggtggttgtggttgtatagtcatcgcgattattggaaggggaatgcgctgagggtcatgttgtatgctttccatgtctttctcgtgctattagggctgtttttggccgttggaggcacttacggggttgtggtgcagattaaggaggcttacgctgatggacagattgaatctgccttttcttgcgctgataatagttgagaagtgccgaggtctgcggagtacgatgtatacaacatacctcgtcaggtcaggtcatgtcgggtggtgtggctaccatcctcacctgttgttatttagactgttttctatatgagtaattgccattgagactatgatcaacgaataaactacaagttcacctttgatttcctcttggcacttctgccgagtgccgtttccgcaaacgaacccgaatccgccaaataagctgcctttcctctttcgtggacatcttgttatttagctcaatattatcaagatagtttctaccgtataatattggaatgtgtacaatgtagatcttgaattgaacgggcatgctatgtattcgccattatcatttattcgtaacaatttgaccttgtattaccgcactctgtgggattactgcagttggattgcaaagtgacctggttttaattacagtttattgatcctccgctgctttttactttttgctttttgctatgttgtatatggagtactccgtaaaacttcttattcggcatagtcaatgattatacgatgaatagctcgcgtgatacatttaatgttgcccaataagccgtacggagtagggagtgacgatttagaatatttacatagcttacatcgaaataccccttctattgatataaatcatagcttagcacatgcgacccagcacaaataggttgttatagaggtcattgctttggcttggatcatctttcagtgatggccaaagttcgtaaaaaccaatagatacgtaatattcggattttgtgtattttataactttaaggttcaggtaaagcgcgggaagagccatggttctactccatagtgggtcgaccttcttagctctaaccgatgccgatttgctctcgaagctcagctccacagacaattcttcagcttcaatacaatagtgacttatgtggagaataatacatcgtgttaccaggccacaacaaaaaccatggtccctatttatggcttagagcgggctgtatctgctctgtttctgggatagactgactgctattgatcaatatcaggttggcactagagtagacacaatggctttcctagggcaaggctgcctacatgcatgtcaaaatgtcctctggtggctagctgaattcaatactggagctgtattcatcagaagctaggaattgcgtacttgatgacctagcgtttggtatccatcgttacaaattcatcatccgggctttcaataatgtcatacccaggtacctgatgtgtgatctgcagctccttaggcctatcatgtcttcagccactcagccattaactgagacaaatttggcctgcggactacgaagacggacttactcgcttgaacatatataattggccacaaaaaggttgtgtatgctgtagcttagtatccaatagaacgctaattatgcgatgctccccaacatgatccagacagcgtatccattctgtcacagatcgacctgacctacggagtatgtagtcacaccgagatccaccgtatgttgcataaggtggcacagctgaagatcttcgtattatgtcgatcgttgtctgatcggtgtattttgagctagagtcaaagagagagcccttcttgagattacagtcgaatgaaagtgaatgatatattgttatcctatttcttttttatgctctgtccttctattgaaattctctaccccatagaatggccaccttagagcgagctagattcgaggaagatgttttgccaaccaccctcgacaagctcatcattccaaaagcagaggacggcaacttcgcattgactgcattacccgaggccgactccatcaccgaaatcgttgaatctgtcctcggccactctgttgagctgcaccgtcttcaagcatccggagcagaaggtcaatctggctgctccatctacttcgtccggaacagtacccatccggaaagaaccgtcgccgtcacaaaggtatatccaccggcatgtcataaagacttctttgaagaactcgttgcatatcggaggttgatatctctttccgatccaccgtctgctgctcggcctctcggggtgggaagaacgcgcgatgagaacaccgcagagcctatcggagtgattgtctaccagctcgcagcaggtaaggcaatcaacacaattatccgtgacattggtcgagtctccactctccgacgtatcgcaaagcagccttgtccggaagaaacaagggaaataatgaatgatattgttcgcggtgcgctccatgggatctcaattagtcataaaacacagcaaatccaatcatccaatattccaactgctgagatgttgcactgtcaattcaatggactgatggccgacttgatttctgccgtccaaggagtggcattaacaatggccaagctgcaccgggaaaagagcgaatggagcagtgccagcgaatctgtcgtcgagagactccgcaacaagttacaaggttgggtccaagagattcagggcccatcgcgaaagcagtatgaacgcgctattggatcccataaaatacagcaattggcctcattggttgaccgagcgattgaatattcacgggaagaaggtgtagcgtcactactgcatgcagatgcctcgccgggaaatttcttctgggaccccgttcaaggaattaccatgatcgactacgggggactgacccgctcgatagatgcgagcggccgacctattggaccggcggaaatggatgcggctgggtttcacgagcgactgcgaaagtatgccggggatttcggaatgagtgaagctgatattggccaggttcagagggggttctggaaagcgtaccaggcgcagggtataccgatcaatgaagggcttgcacggttgttcaaaacacgcacacaactatctcgactatggtctgctgtggaaaagcaagatacatcacgcgatgaacataaagctctccagttcagcgaaaaagttgaattcgaatgggaacgtcttgtcaatatctcgcccgaaaagatccaaccttggagagtgctcgtccttgccaatgccagtgggccaggtaaaggaggtctgcctctgttgaatcaagaactagtcaaggccatgtcagaaatccccaatgcatcagttactctattcatggtagagcctgagaatgaagtcaaaaacacattggcatggtcagggcatggtcgggctaaagtagtctgcattccctctaggggagccgaccccggtgccttgctctaccatgtggcgaaggttcaacagccaggagattatggtctgcccattccagatgaccagcatccatgcccattcaatctcatcattggccactcgcgatactctagcaccgcagcttccttgatacgtgagagatggtatcccacagccaaactcgcgctcatcacacatacaagtgctctgcgcaagtcagacatagcatggaagtggtacggacaaacacgcgagcaaggctatgttgaagccgctcggttagcaatgctggacgagaggattcttccaaaagcagatttggccgttggagtcgggcctgtactcacaactgaagcacgagaacgcgagtggatgggccaatgcaatcggccacgatccaacatgacgggacctcgctttcatgaactaattccaggtgtgcgcacgggtgatgcttgcacgcaacagcgacagcccaacgacctgtttcgggtcctcctcgctggtcgagcagatgatcccgccaaaggcttggacgacgccgtgtacgctgtgcgcaagatcgcactctctggaaacgagatctccctggacgtactggggctcccagtagaagacgtggagcgctggcagcaagccgtcgatgagatgacgggcatgccagacctcgtcagattgcaccctttctccgatgaccccgatgcggtctcgcggttctactgtaacgcggatttggtcataatgccctcgatgcacgaaggcttcggaatgattttcaccgaagtggccggactgggcgttcccatcttagtgacgcaggaaagtggcgcaggtcagtttgcgcttgatcgcactcgcattccgccgggacttggccaagcctgtgtggtgatggacgagagcacatatggaattgtcccttcaccgacaagccagcgcgtagccgtctgggcttatcggatcgaccaggtgagatgttacccggagcaaacgagacggcatgctcgttctctacagcgaatcatgcgaggttattcgtggaaacacgccgctaaggctctgcttcgctccgcgatggagggtgagggagatacagtgcagatggcgcatggcagcattgcaccggcttattcatcatggtctcgtccatcgcttgggatgagcgtggtatcgtcaatgcggcgagctgcacgaacgcgaaatcgaagcggaaagccgactttgaagcaggcagacgaagtaatgcaaaatcttccagagatagccccgactatttcagcgctagcagagcatgtctctgctgctgttgggtgtcctgtcaacttgcggagtctcgatcccactcatcccgggggcttttctggtgctatcattttctttgcttttgccaacgatgaatttaccaatggagagacaacgttgtcatctaatgaccgatgcaaagaccgtgcggttgctgtggttaaactgttcgtccacggcttggataatggcatcacggaggagttgtcaagcttagaatggcttcttttgcatacaaagggggacatcaagactgccgccccgttagccgttgggcagatgacgtgggatacgaaaccagctggtgtggtcacatatcaagttgcccccggggtatccctttatcagctcatgatgcagatgggccgcctaccgccgggacctgcgagaagagacatgctatccgccttcattgctggcgtacaggcagttgcacgtaccttagccagattacacactcatagcgttgaagggcgaccaggcacagagtatctccagtggtattttaacgcagcaacaaatcgagtccagcaggcattgctgtacaaagaggttattcgttccgcgggactcgaagcggaccagctcccccagaaaatgaatcaacttattgccgattgcaggcgtgatattgctagtcgtccgcgcaccactgtcgtacatggggacgcccatcctgggaatttcttctatgactgcgcgacagggcatatcactatgatcgacacgacgacgctacactgttctctggatgagaacggtgagccgcttggtgtaccggaacgagatttaggccatttcgtgcatatgctgcgacgaacaggcgaacagtatggccttacgcgtcaagagatgcaggagagcactactgattttgtggaggcatatcttgggaatgcagcagcgccaataagcatcgaaatccttcagttcttgatgtcatgctcggctctgtcattcttgaactatgcggcacagtcagatcagacaaaggtagaactgcaggttggaattttgcaggatttatttcgccttggagagggtttgacacaactggatggaatgcgagttttataaatagaaatcatgggctgctttgtacttagatatttttcggatgtcgtgatctaattcaggagttatgataataattgacactgttggatatgttcgatacctcgatatagttccctcttgtgtctctctgttcttttgatccactgagtagtctgatggcgcctagctttgctagcaagtgttcatcatcaggcaagatgtgccgacccatattcttgacccacttctcgaaagtgattccaatggagtgtgccgtatttggcggtaccacctaatgttgctggcaagacagagcgagaaagccagcagaaatacattggtaagcagccagactctatgactagggagcgagtagtttgggcttcgcatgataggattgcaggtagcagctgtgttcaacctgagcgtggctcttggagattgatcctgggacacaatcctgttttcatgagagaattcagcattaaagggctcacttcgcgaatggattcgcgtggatagtaacgttgttgattttgaatgcttcaaagtcatcaccctccttgggctgagaaactttccccttcttatcgaccttcacattcgccttctcgatatttgtaagaacatcacccccttcgtcctggggggtcaaattcaacaccttcccaaacacagtactggcgccatcaagatgtggcgccggcacgaacgtaatgaagaattgactcccgttgatagtagcgcccgttgcgccctgagagccaggcgccgtcctgtccttcaccggacgagatgccatagacagaatgcctcgcgcattgtgtcgcaatgatgggaggtggatttcttggttcattgctgccgggtggtatatcgatgtgccgccttttgggatctcgaactcgagcattggtttcatgcttgtttgatgcgcggcggggccgagagagatgtctccgccctggaccatgaatcccgggatgaggcggtgaaatggggtgttgttgtatgcgccgcatgcgcagagggcgagaaagttctctgcggtttggggtactgcttcgcagaaaagctcgaccttgaggtcgccttgggtggtatgtaactgttcaagttgtaattagcatcttgccgtaggaggtagagctgcagaatcattggaagccgtatttatatgtgaacttactgtaacagacatatttaggggattttgtaaggtaaactgtgcaagaggcggcatcgaggtaccccggggcctgatacagtgcttagtcatacttttcttatcgacgcgccgggcaatcgtcgcagatgtcccttcagttcagacacagttggctcaatttatattcaaatacgcagaaaggttctcggcaactaccttttgctttttgccttcttaactatccctgtcctgcctggtcccagccatatcctccctggcccctagccccttcctcggacaaccacctcaagaacaatgaacaatcggccggtggaacaggcgttgagcacattggtgccgactcatgccaatgaccttccgcaagaacttctcagctatgcaatgtcactagtggcacagtcccggagcttctcaagcagtctgaagccggaagaggaaattgctcggccttatgcctgcgctgaaatcgcttgcagaaggtgtgccacaggtcccgaatgaggtctttctatggctggcttgattttaagacgctaattgcttgtgtattgccctccttaggttgactcgggctcttaaattgcctccgctgctcggacgtccaccatgtcctccgcgcatatacaaaaagctttattcatacctcgaccgatctctcaactcaagctctaccggtatcaaacgctcagcaagcgtatcggttcccggaacaccctcacgtgccggctcagcgcagaccacaccgacgaagggcgcggcagccaggaacaccccttccaaggcagtagctccaacaccacgaggactacaaaatacaccttcgaagtctacacccttgaaacgaagtatgagcacagcgaaccggctggagagtccctcgaaatcggcaaaaaaggctacagcttcccgaacgaaggatgtttatgggtcaaccatcattccagacgccccagcttgggtaatgacagccgttcggactgtatgcaagattctttcgacacctgccccgcgcacaaatacctggtctaggcctccaatctcgaggaccctgccaccgcatatattttctggcgtgtcgtccgtcctctatcttacgtcgagcatgtccaatgacgaaccgggatgggaccgggagagcttggatttcctggaacctattgtgtccatcgatggatctgagaaggatgatgatttcaaagaactggtttacgccatggttgttgctgtatacttccttgtgctcgcgcgtcggcgcaaccccggaccagatgcagagacggatatcgaagcgcagaagatggataaaaagacatttattgaaatgcgtcagacggcactgaacagccttgggctgaaggctaatgaccggaggcatcgcgacgatgttgaccaatggatcactcttatcatggagcaagggtgggccaatgaccaggaatggtttgagaatatcccctatgctggacagctctatggcgaagacgaggaaggcaggtcctaccaagatctagacgaagaggatgcaacactcaggggcgttaggccgcctaaacgggcggcggctgggagtgggcctcgtgtctcgcagtccgatcatgctccgcggggtggtcttttgcctggcctggggacaatgatgcaggatcgaatcgactggctgagtgatgaccgtcaggaggactatgtgaattggaaagcggatatcatggcccgcatcgaaggtgcagcggcttaataaccgccgtgcgatgaaaggttattccgaaggggacgcagcctgctaatttaattgataccctaagatatgaatcaacatgtaatttctatattcatcctcgataagtaaagaaagcggcttcgccgttatgtctatgttttgatggtagccccttttgctctagagcaacccaatgtcccaaggcaccattctggtaacctaactaactccatgccccgtcaatgacgccaaatccaataaatactaacctcagtaccaaatactcctcgttcggtgatgaggaatggactcattgttctctgcctccaggcacttcatcgtatcgtacaagaaaaagtcgatgaggatcgcattgatgccatatgtcttttgtggtttctctacaatcttcaatttctcatccaactcatccgaaatgtcggtttcgttgttctcattgtcgtctgagatgcccttagaagggagcttttggcggttcattttgacctcagggtgttgtttttcgatctctcgtttgatcaattcaacacaccagatactcgttccacgaagctcgatttcccagtttgagcctggctcgatgggcttcaggtcgcggatatggttttccaatttaggcgcgtagcgaagacagttcagctggtgcagcatctgcggaatgcggtagtctatttatggttagattaggtttgaggaagttctaagatctgcaagaggcgtacctgcaaacatggtgatcttgtcgatgtcatggaattcaccaaagtcttcgccattgaaacaggcccagagatcggcgactaggatctgagcacgtttgtagagtcgcactctctttccgtggaagaccgtctcatcgcggaagcaggcaaagctctctgtcaatatgttgaccagtcctgcagcggagtgattggcgctgtcaatgcagttgacgaagctgccgccgaattcctatctctagttagtataggtcatagaaataaggcgggaatcatacctcgcaaaggacttcgcctgcttcacgtagacactgcactcgttcttcaaacataggaatttctccatctgttgcagatcggaatacatgtctaagtagctcttctgtgcacctctcttcatccacccagaagtcgggggttgtgattggaatatctgacgttggggtaagtactcatcattctagaagtagagttagatcagggaactgaccttcatcaagagctctttgtagaacagcaaccagactccaatagccagtccacagcttgccacgatactcaatacagaaacgctttggctcttcgtcctcctcagaccagaaactaaagttcagcaaatccattgtgaatatgaagtcgactgtgctttcatccttggtctttgggtgtagttcgtgctccgaccaggtgtgcgtggaatactctttcttctgcatcatactccatatagtttcggcagcctctttggtgtgagcaaggctgaccgcaatatcaattgcattgtcgaagacatattgagccccctcgagcactttagtttctggtggggcatcctttggtctttcgcccagtccgaaatgctggcgaagaagctctaccaactcagggtcggcttcatcgtcggaattggcttcgacctgatcatttctctcggccggaattggatccaatgatggcatgatattttctccttgtgttgccttgatcttgattcttgattgaaaacaaatggaagatatggagtcaggggtatctcctttgatatcgcgtggaaggattccggtgagaagctagacccagccgatattccaccccacctggatattcgaatcttttgaggctcgaacaagcaaggtgcgatataaaattacttgaattcgacgaaccctttgagtgaccggtgtttttttttttttcttgccacaccgagattttgtcccgatggtctttggatagagtcaccggttatgtaagcagacacaataactagttatgcccataatgtatctggaaagctctcagatatgcgatattgtggtaaatatcagtgatattgaggatttgcatctaggggcaatggctataagcgcaaaggaggtctgtacattatggtttgcagtgacacaggtctgcaggtctagattgattacctggtacctgagaaagatataactatggatagcctcgtcatgagcataaacaggcacatttattttaagattatactcacgttcattgatcatctaaaatagggcgatcagcgtatatgcgctagtatatgcgccagtatacagtgcgataatgcaaatgatcacttacaaggaccagaagatgagaaaagatcagaaaacaacgtcaattaaaactctacatctgcattttactctttcagtcacagaaaaagcaaataaaaaaaggcgtagaccgaaaggaagcggaaacccacgtgtgaggctcccagcaagtgccgtcatcgccaacggtcactgttcccggctcagcacttctttcacttgctccttctttgaccttttcccccttcgcaacttatctctaaaacagacgcgctactacagcactacactactgaactatttcaacaatacaacaccacctgatcgcgatcgtcatctactgcccgccatgcgggatagctccattaagcgctccctcggggtggacctcacccgctccctcaaagaggtaagtacagctctgctggttttcaatcctgaggtccaagtgatgttgtgtcaaaatgtattctgacagttctctcatcacacatagtcgcgcgttcttcttgtcggcgcaggcggcatcggttgcgagctgctgaaaaacctcgtcctcaccggcttcggcgaaattcacatcatcgacctcgatactattgatttgagcaatctcaatcgtcagttcctgtttcgacatgagcatatcaagaaatcaaaggccttagtacgtccaaccgaccaccccgcgcacttgcaccgctcctttgcgaatcctccccgactcaagcgcagcgcattcacatcgtgtgagcggttcagcgataggtgatatggaatactgagatatggatgctttcatctaggttgccaaggaggttgcgcaaaagttccggtctgacgcaaagctcgaggcctaccatgcgaacattatggatgcccagttcaacgtctcgtggttcgaatccttcaacgttgtattcaatgcgctggacaacatcgccgcaagacgtcatgtgaacaaaatgtgccttgcagccaatgtacccttgatcgaaagtggaactacaggcttcaatggccaagtgcaagttattcaaaaggtcagccaaactgatgcccggcttcgcaaattgggcatcttctgacgcgcgttattttagtcacaaactgagtgctacgattgcaccccgaaacaaacacccaagtcgttccccgtgtgtacgatccgcagcaaccccagccagccgatccattgcatagtttgggcgaagagcttcctcttgccgtaagatccagttccaatctgtccgctttgtatactcaccgttgagtagggaacttttcggctatagcgaagatgaggcagcggaggtggacaacacagaagacgctgataacggttggttcgatttgatctataactaggcgctgaaactgatttccgtctagcaaatgaaattgcagacctgcgcaaggaagcactggagctcaaagaattgcgacaatcgattggcaccgaggaagcctatcagaaggtcttcgataaagttttccgaagggacacaatacgattacagggcatgaaggagatgtggaaggaaagggatccaccagagccccttgactttgctcaactccaagaagaaattgcttcgatcgactcgacgatttccacggatgaccagaaagtgtggacgttgggggagaattttagtgtttttagggataggtagggactgtctgtcaccgatagcatactttcgataaactaacatgctacagcttgaaccggttggcccaacgtctgaaggaacttcaagcaaacaaccccccaggccaagattccccggccttgatattcgacaaagatgatgtggacactttggactttgttaccgcaacagctaatctacgagctgcgattttccaccttgaactcaaatcgaaattcgatgtcaagcgtgagtctatcaaataagagtgcacatttcaaggcgctcagtattaacacagcttctacagaaatggcgggcaatatcattcctgctatcgcaaccaccaatgctatgacagctgggctatgtgttcttcagtcattgaaggtgttccaaaacaacttgatgcaggccaaaatggtaagaaccaaagaagagcgcccactactaccgaagctaacaagccatttctctggaaggttttcctggaaagatccggcgctcgtgcgatcaattcagactcattgaatcccccaaaccccgattgcccggtctgttcccctgtggtggctcgagtcgaaattgatcctgaggtagcaacccttgaacacctcattcaaggcgttcttcagacggagctgggttatggcgaagaaatctctgttggtcttggcagtgaatcgatctacgaccccgatttcaccgacaatctggagaaaaagttgttcgacctcggcatcaacaatgagagcttcatcacggtatacgatgaaaatgaaccagagcgaatcaatctcgagctggtggtcattgcaaggtaagcgctatattgtcaagaatactaggcaatattgactgattgatttgcagaaatgagccatcttccaaagattccaagcccgcaacgctgcagaagatggtcgagatacccttgaagcccaagcagcctgtgcagccttctagcgatcttccaactactgccggtgatgcaattgagaccgggaagcgcaagcgtgagggctcaagtgacgaggtggagctcagcagccacgatgtcaaacggctcgctagtgtatccgctcctgactcgaagggcatcgaggctatcgttcttgaggacgatgatgagggaggtgccatcatgatcgacgattgaatgccgaaaatagaccttaccgtagcatctcacgttattaccagcagccttcgcaggtattcatcttgacatcattctcttcatactttcagcattcccctttttttttgcttactacccccttcaacctcttctgtatcatatggcataaaggcgaacctgtttccagtcaacagggttcgaactcacaggttgacgagcatgctttggatatgggcatgataatgtatgcattttggggttttgtgtctcaactgctcagtggcgttctctggtttgatagattactagaatatgacctgcgaataacaacacggccacctgggcaaagtatcaaagttgcgtttgagctgaatcctgcgggcattcctgaaatagttaacggaatggaggtgttcttgcttcaaactggccggctcacctaagaactcgaagggaaatatgagagcacgtcatatgtgcaccagttgcctcgtaaatattatgaaacacgggaccttcgcggagggatagttaccgcatttgctaggactaatggtggatcaacccgtttgattgtggatgagatacatatttgttacagctgttggagaattttgacttattgattgatattacacatctagcttggatcgaactaaactgcacttaatccaccatcgagattgagcacacaattgttggcatactcattctgcgccaagaatacagctgcatcagcaatctcgcgtggatctccaaatcgatgaagaggaatgacatccttcagccggctcgtttcgcccggggtgaagtctattatcgaggttagtcgatttacgcacatatataggatgcccaaaccaacatacctgcaaccatgggtgtttcaatataccccggcacgatagcattcgaacgaatgataatatctttcattgaagccgacgcctccacggctaatgaccgcgttagaccaagaaggccagccttggaagcagcgtatggaaccgcgccagttccgcccttgagcgcgagtagagaggatatgttaataatgcatttcgatgggggtttggtcctcgcagttggatcactccgattccgtacacgacttcggatggaagcacgcattaacgcgcgcgatgtaagtattgcgccttccagattagtacggaggattgtcgagatatcttccagctcggatcttggcaggatgtttgatatcgaaattcctgctgcgttgactaggatgtctacatttgcctagagggtaattaggatgagagtattcattgagatagatgagatcgcttaccatctccttttccagttcccgcatccatgatccggcatctgagacatctccgacaagtagacggatctttccttgcgtacttcgttggttgtcttcttccggggcgcgagttacgacatcgttggtttcaccaatttctggtggtatacccacaagagagccaagctttgcggctgcttcctctaagcgtttttgagatcggccgacgaggactatggtggatgcgccttcttgtagaaatcgttcggcaatggcgaagccgatgccggatgtcccgccggtgattatgcatcttcgaccggcaagtcggtttccaggctgaaatgaaaccttgtggttgttttcatttggctgagatgagtatgaccgctttgtatatcccagaggatgacttgatagtcgactgttgacgtagcctacattgcgtgtactgatcggccttgacgaggctcgaagaaataggtttggcactcgcatgcgaatcaaaggaactctcaagctgcccatattgtttcaccttgtctcaactccaagcaaaacgcgatatcgggaacatcaggtgcgtcactggggcagcttcagcacggaccaacacgccaacctcagaaggctctttcgctccacagcggtcactttcctacaactacgcggatacgcgtacttcatcatggcgccatccacggaaaccgagtttgtgactatagtctcaagcgacaaatttgaattcatcatccctcgcagcgcagcttatgtctcggagaccttacggcgcatgctttcttcgagtacgtggactcgacattcattgctacatgggtagtactaaccacgcacagataatttccccgagggtcgcaccggtgtatgtgtcttggaggactactcgtacgtttcgcccttgtattcctttttccttttcgtgggcattgctaatgttctttctctgcagcggtgtcattgtcgaaaagatctgcgaatacttttgctacaatgaaaagcacaaggaccaggtcaacgtgccagacatggatattccacctgagttgtgcctggagctcctgatggctgctgatttcttgaatacttgattcccacgtggcgcctttagcctttggtctctcatcacctcgactgagacctcagatatctcttattcttgtttcggctcacgtcgcttttgaaatgattcacggcgcaatgacacaaacattcgacttttacgataataccatggggagttccagactagctcacatatataggcttggtcatggcgtttatgtgatggcatgtattctatgggatacagtgctcttacattatgcaagtatttttcttctttactatagcagtactctggaactttgtagaagacctcttatcccatctgagcatatgcaaacggttaatacatctatggccgaatttgtctaaagatgatggcagatcaacactttccaatgttaacacgctttgtcaatctaccactggcaaagggtttggattataggagacaaattgaacaagaaatcatatcgtatcatagagttctatacttaagatggccaatatcaacttaggctggacctcgggcattccggtggctgagtcagcacctaatgacctcgagagggctggggccggctccaccggggcgaacttccaaggaagtgcccgccatcgtgaagatcactctttcatacattctgatttgcgggatgcagttcacaggagcattgctcactgtggtgttcagtctggttgtaatatctttcggcttttgaacattctatttgcttgtgcctacagttggatgcactagcagccttttgtgttgattgcatctcccccggatcgctgataagggtcacccgcagaggcgcatacaacagcgactcatcatgtcaagcggcgtggaaccctcctcaataccaacatctagtgcggctttgttacaacatttgaatacaacattatcaccggagccctctcctttgtcctctttgccgcatcaactcctgacctccccccttcgcgcctttcaacacgccgagacctttgccttccgaacggttccccgaactttcgctagaataactggaattaaagcccttggccaaactatctggggcggggctggttcaacatctggagccagcggtacggccgcaacacatgcagcggagatggctgcaaatgagttcgccgatacagctagccaggagagtggctactacattgcggagctcttgggtgctatgaagaagcttggtggattctttgggtatttgacaagtctttggtcatttgcttgtctggtggaggtgagaccccgctcttgacttgtatacttaccatgctgatgggtctaggcgctcatcctaaaccgaattactatctatgcatccacacggcgacaccttcgactaggatgggaaaggcgtgcggctctccgattgattcctatccttctcttcgtctcccaaatccttagcctgctccgtggaatccgatgtcagacatcgccgtctttttcgacaatgcgctacggatctcccgggaagcaactcgtattcgactattccagtgacgggggtgctctttactcaatcagctcgactcttttaggatgggagtccgaggaacggtcgtgtgctgctgtgaggatggcgcgcggaaccaacccgggtgtcccatatggatcattttccctactctggccgacattcatgctcctttgcttgagtcacttcatcgaaacactctcttgcgcattgcaaggcaagcctgtgatgactgagacggggatgtccatcttcgagcactcaatcgccttcgcagaagccgagtcgatgatcagtaaatctatcggactaggcctgttcggtcttcctaaacaaagccctcttagtgcgctttctggtgggtctgatgctaactcaacttcggtctttgaacttctcacaaggtcgcaagttttggaacgcatgaatgtcacacccgaactgctacttattgtattgatatcgtgctgcaatagtgcaacttcgcacatactagaagtcttcggcaagcagagcaaatatcggcttttcagcactgcattttggggtgcctgcttcatgatagccatgttgtgggggttagatggcggtccgcccgtcagcctcgaaaccggcgtgctcaggttcccgactgtttgcattgtgggattcatccctcatatctttttactgggcggcatcgtgatttgtctctcaatatacactttagcacttacaatcaccgctttttcgctgccatcggacgatcaacctgtctccctctatgaccgcttcttgatggcgcatgagaatatgcaaggctcgaaccagataaggagcatccgtattaacagacacgaagacttttatacaacgttgcttcggatcgggtatgttgccctaactgcggcaagtgaggctgtgttcttgaacgagggccaatcagtcgttgcacggcggatgacgtggttagaagaggatcgcctttctgaaattgaagcctctaggcggaagtcttcatcttatgggaactggcagagtcagaccagaagtcggcctatcgaggctatgggtttctcaagtttcgacatgccagaacaatctgcttgggagagtggctacaaccgcgaaaaaaagattgagaaacccaagaacggtactcgagccgtacaatctcgagccgagcttgggggagttggcgcagtgcgagtatcgattagattgtggcatgtcctctcgttcttccgcgcaatttccctccttatgctccgttgggttgcatatggactcaacaatgtgcttgatcgactagggataaacgctcggccaatgtggctcaaacgcatggtgggtcatcgtggaaagaagtctaataccgacaagacgaacccatcacagccattagatttctggattctctcggaaaatggagagcttgagctccccgatgaccatgactttgatgtcgagatcgagatgaggaagcgagagcgcgcgaatcggccagactggatgggctcggatgaaagccggctagaggacagactctacagctggtggaaaattggcggtgcatggggaaaccaagatcaaacctctgattattctccgccctctgatgacttcgacaccacgagcgtggtgtccatgtctaccaacgcctcggattcagaatgggaggataacctatcggaagatggtcgtcgaacccctacccagctcgatccgtatgcagacagggcaagcccaccactccaagatcccctgatcgacatgagcacactcgcccgtcttcttgacccgcgcgaccgcgagagcagagaagaggccaggattctagccgcccatcttaaaacaaacccggacaacccacagatcatgacgcgcagtcgctaccagaaacaagttgaaagggagagatcccgaatcatcttctcatcccgcctccagcagctgaacgctatgaactcagaatccgaagggcggaaacctactccagaagaggaagctgaactcctcgagaagctcattctttcccgtcgctcagaaacctcgggcatttccgactcccatacatgggaatccggggcaacaggcctcggacccaatggtccaccctgtgtggtctgccagacaagcccacgggccattatcacctggccctgtcgctgtctatgcatttgcgaggactgtcgcgtgagccttgccatgaacaacttcggcagctgcgtgacttgtcgccaggaagtcgtaggcttcatgcgcttatgggttccataagtcaacctatttgtttcaatcgctcagtttttttagcttgcactcttttatctttggctcacataggttccatatctctgaacagtttgtaacatattacatttgaagacttttgcttcgtatggcgatttccagaccgtgacttatctattcgctaattgtgttcttgctgagaaggctggtcgttctcgtctctcctagtgatttgcttgatcaatcaatattcagagtatagaacttgctgctccaatctttttctactaagttgtcaaaaaagtcactcagctttatcaaattcgcatggctatcagtcagcactgattttgtccgtctgtctcaagctggttaagaatatcagaagtttaataacggtccttctatgctaacacaacttaaaataactagctataaatcgtccagagctttccccgtcaacgcgaagtgctttccaagtatctgccagcctcatctgccagcctcatctgccgacttcataattcttggcgatcctgcatcttccccctccacccctgttcgacatgatgtcttcttctcggcttcagctggagttaaaacaggtatggaagtcttcctatgtggtctcgggaactcaatcaagctcacgcaaggcagacaatctttctagcctgccatcccaagcccattgccacgagagaagtcgggcagctagatccacagcaaagcacaatacaccgtctggaactcgaagcagcctcctctccacccgattttccaaagatagttaccatcaaacaacaaaaggatggatgggaggaagaagaatttcgacgaaaataatagcatacaagcggcttcaaagtcttcaaggaaaatcgatcccaaggcttctaggtgaaggcttcttcaatgaccgtccatcaatctttcggaaattgtggggatgcctttgcatcagcttgcccgggatgatacgattgaggttgacgaggaagccttgcaggctggtcttttggattcttttcggacgctattcgtaaaggaagcgaagtattgggatcagaggctagatgatttcctatttcgtctcgacagggagtacgatcaagggagagtggtgattgttgatctcgagcaagttatgtttcccgaggagtctctcccttgggaagaatctagtcaaatcagggaagaaagcatgaactttggcacggcatgttcattgatgagggctttccgccagatcaaacgtgcaacgccattgggctggactagtgggtgtgtcggttgtaaccatgagggaacaattcgatgtgaagaaaatggagatctgctaattattaacttgtgaacctgtcaatctagtattgtgtaagattactatgtagaagggtaacccgtttgtaggaaggaggatacagagcttaggcaacatgttagattacttgattgtgaatgaggcctctcttgttgcttgagcagggagaaccatgactgtatgtgaaatagggaatgaatggttgccatgaaaagcaaaatgagaaagtataatctcaatggaaccatattacataccaagaaagccttggtattactcctccttatagaccagaggccggtactcagcctcccacatctggattcgaatccactctcgtagctccgattcactggtagggataccctctgcctgtgccaggccctcctccacagcacacaaaatcacggcggtggcaatgtccacgctgatttcgcgcacatcttctacatcgggtagcaacggcttcatagagtcttgtagggccggtgaccgtgccttgagtgcctcgacggcagcgactagcatcttcttggacacaagacggcactgcgagaggactgctcccaaaccaatgcctgggaagcaggttgagttgttgcattccgctgaaatattatggttaatatactgaacagtcaatgtccgggacgagatttggatacctaccgatttcaaattgcgtgccgtcatgggcgactggcgggaatggactacccgtagcaacgagagctcgcccatcggtccatttatagagatcaaccggcttcgcctcgtggaggcgtgtcgggttgctcagcgggaagataatcggtcgttctacatgctcggccatcgcacggatgacatcttcggtgaatgctccgggcttggttgaggtcccgataagcacatgggggcgaacctttttgacgaccgacagaagatctcgatcactgtccgaccacccatcgtcgctccgtgcgaaaggtttctggccttcggtcaacttatcacccatggacttcataaggagaccgggcttgtcaatgcacctagatgaaagaatggtgttagcgggggtgtttatcttcctttttcgcagttacataccagatctgctttgatgcttcgtccttcgactttcctgtcttagtggcgatggtatctgaaacctggtcggcaatgccggtaccagccgttcccgagccgaagatcactactcgtacatcctccagattgactttgctgacttcaagggcagccaacatggcggccaatgtgacacatcctgtgccctggatgtcatcattgaaacagggtatctttgacttatatctatcgagtatccttcgagcattatccagaccgaaatcctcgctagtcttgttagccgcgtttcgaacaatagaaaggagcatttctcatacaagtggatgtaagccttggggaatcggttgcgggcagccgcgacaaatctgtccacaaactcatcgtacttctctcctctgacccggcgctgtcggaggccgaggtacagtttgtcatcgagcaactcctcattctacatggtgtcagcaaatgtagacttaaccagataataggtatacctacatttgtaccgcaatctagtacaacaggaagctgacgcgagggatggattccagcacagagcgtggtaatagccagtttggcaaccgatatgagaattgcacccacaccttggtctccaatgcccaaaatctgccaacaattaatggtaagcagggtatcacaaactctccgtcaagcagatatataattacctcttccccatcactgacgacaatatagtcaacatcctcctcagttccaaacccagagagatactcatcaaagttatcctggtcattgatattcaagaaacacccttcaggctttctgaacaatcgcgagtaattctgaatcgcatctccctcagtaggcgtgtaaatcacgctgaacatctccttgagattggtttgcacgagctattcataggttagtaataatgcacatgctgatgttgtttcgggaagatatcagaaccttatagtacagcacatcattctgagccttcatgctagccaggaaggtattcttggctaggtcccctgctctgctttgatactgctcataagcgcgctggacctgctcatccaatgtctggatgttcggcgggaggagactgtggagcttgaatgtcgatcgctcatggtctgggaaggccgatcctttgttatatttggatccatggaggacatggtttccctatttctgtgtgagaatcggagcttataaaagaatgcggacgtgtggtcaccttgtatgggcaaatcacaggccccggggcgcggggtagatcgcggaatttagagctagagtccgacatttggagccaatgccaagggatacaacgttgggatgaagaaaagcagagaaagattggaatatgagaaagaaatggtagtggcggggtgtggagcacccgtcatcaagcttctcgccacctggacaagagcgcatataaaggcttatcatcatcttttgagaacatggtacaatctagtatatatatagaacagccaaggtatgtataaatcaaaataaagtaaacaaagaacacaagtataaacctaactttgtccttgctggtgatttacatactttttacctttagtagataagttactacaggattaagaatcctaaacctgctctagctgcctggtctattatattatatatagcttgagagatagctatatagtttggagtactttgtacaccatgagcaaaaggtgggcgcatcgcccgtgaacccccgtacgtgattattaagccattagtgacgtcatacaattgaccccgcattctcctttccatttcgggaatagcgccctcccctctaaattgggtttagcgttgtccagcttctgtttattccagccctactggtacaagttggttgatactcaagatgatgatcattctaagctatgctactggatgatgatcacgtgaagtcacgtgccggtgacaacaacatgccggccccgaaaaaaaatctcgtcccgagattgaactgttatgccgtttgggagaaccgtttcggtggctttatgcgaaggtctctctacgtcagggggctagtggttcgcgggagtagcttgttggtggttcgcggccaggggggctgctgttgatgtgacttggtacgcggtggtgtagtcactttccttgacggagccgatgcgggtcgttcttccaatggtctgagaaaagtccgtattgtttgcgatccggatgaagccgaagtttgcgtcgatagcttgttggggttattcgtcgcttggcgacagagcgtggagacttggctctgcgtggacgaaggcttgaaggatgattttgcttttgaaagatcctctttttttccaggagaaacccactggatgctaaccagacatgctaccaaagttacaagttggttgatactcaagatgatgatcattctaagctatgctactggatgatctaagtacagtgatcacgtgaagttacgtgccggtggcaacacctacaatatagaccttcattcgaggttctggacgtaaccaccccatctcacaagtggctgatacataacaagatgttacctatcgcactttgctctcacgacaccttcattttcactttacttgatctttactctctatttatctttcctggtcttacggccaaatgagagactaccatggtaggtcctattgatatgactcgatgccgcctcctataacatcctagtcttcatttacttcctagttgatctcgcatcggagtcccaacacttaatctagtattcttttcagttatctcttactaaatcttcactttgtccttaggttcttcttcctcctctcttcttgtaagccattataaaagctcttgttcatttgaagcgagagttcaaccatccccgatatgaccaaatctattgtgtctatctctagtatcaattccgttaactccctccatttgcaatacgaattcgcgatcaagtgcaagtgggttctcggagagaagaatatcataatctccggcatcgtggactattctctttggtttggacaggctgggaacctagccaccaatatggctatggtggaaaccaaataatgcgtggtggtttattcatcttcgtgacgatggaaaggtatgaaatggagatttataagaactttgggatttactgctaatatatgttctagtacactgaagacacataccactggcattcagacgcctgcgaaatcatctcggtcatttacaaaattatgcagcatgtctgcgggttggaacctccatcaaggcagggtcgcgagttgagcagacccggaaccgaatgttcccggttcaaagttgtgtcgtggacactacggccgtaaatgatactacagctgctgacggtaccgataccaatgatgaccctctgccagctaccgagtacgatgccagctcactagcggatgatatagccgatgaaagtgacctgggcctgcttagggaggcacttatcctacctaaggacggatggactacagataacccaaggctgaggttacctcgcgtactaagaaccaatatcacacgatacgccttccataccgagcgaactttcgtactcgcactctgctgcctttacgatgaatcttccctgtataccttacgttaggacaaggcaaatatatctcacccaattgatagccagcgtaacggcaagagacctggccctttatcaggcggaaagatcgatatgcctaccgtcgcgacatggttcgttttccatttctcaattcatgactactaggacaacctcaagcacaaatcccatctcgctttatcttacgttcgcctaacggacgagggcgttttctactgctcatacaaaatgacactgtactaaagaagttcgcggtttcaggctgactttgactaacacagggatattcgtacctcccgtgtgcctctggacccccttatgattgtataggccaacggattaccctggttcccggtctataaggcgttctacgtcctctgtggaagctggagccctgcgtcataccttgtgggaagaaagtaccgctctaagatcacggatttttacattggcgcggaactggccccacctgccgccgtcctgaccaaacaaagtaatgtacatgggtaactacctactagttatcgtcgcgggtttttgggaaccttggcgggtggaccaggtatctgattacaaatcttatcttatcttgactatttatggagtaggtacctactacggagtactttcactctactttcactctcttaatccgtatataacgaaatcattctccaaactcaggcataacttcacacaaggagagaaaatggctcccacgtacaatgcaagcaccacggccgctgaactagtcgatcatctcgccgccgaaatccaaggcaaggtgattctcacgactggaccctctccgaacagcattggagcaaccttcgtggagacgatcgcacgctctaagccggccacgttaatcctggcgggacgcaacacggttacgttgcagcaaacagcagacgcaataaacgctgtatctccacaagtctcagtccggctgctgcagctcgatctggcctcgctgtcttcagtccgccaagctgcgtcggaggttaacagctggagtgatctgccacatatcgatatccttgtcaataacgcaggaattatggctactggttttgcgctcactgcagatggctacgagagtcagtttgccacgaaccacctcggccctttcctcttcaccaacttggtgatggataaaatcttgaattctccatcgccgcgggtggttaatgttagcagcgatggtcatcgactcagtcctatccgctggggagattacaacttccaggtaggctagcagtttcgctccccacttgcatatctaatgtgttaatgtggcgagttgcaggatggtgaaacttataacaagtgggctgcctacggtcagtccaagacaagcaacatcttgatggctacccatcttgcgcaaagactgggttccaagggccttacggcgtatagtttgcatcctggtgtcgttttcggcactacccttgcgaaggatctcgactggactgttgacctcccggcattgcgtaagtgattatcaaaggtattcagaaatcccgcatggctaatctcccctaggcgctgtcgataaatttatggggaataaggagggctggctggagttcaaacaaaaaagtccccaagaaggagcggcgacccatgtgtatgctgcgtttgagccaagccttcgaggtgagacgacgacccccattcgaccgatgtacatgctgatttctctcaaagatcacaacggtgcatatcttcaggactgccatgtagcagatccttggacggataccatcaagccctgggctacggataaggtcgaagctgaaaaattatggaagctgagtgagaagctcgttgggcaggaattccgctattgacagaacacagtagggcgtcacgagggagaataaggctggcatcgaaatgtctctcacttcaaaatataggagatggcaatgtgctgtactgtaacaatccatctccttgcatggacaagacctcggaagacattattcgccccagagatatccgctcttggcacttaaatggcatcatccatcctgcgagaaatcaagtgaagtcactctccatgctgtcggtcgcagaaaaagcaaggaaggtctcaggaataattgtgctgggcgtgtgctggcgtttatttttcggaggtagcggtgacaggaccctagtaggtggatagtcaccaccaaaaacaggattcacgtctccaaagcaggattaccgtctgaaataagtcgtacgttttaacttatgtgggcatctctccatatccttctttttttttcaatacagcctggaggactccgtactccgtagtgtatgttttcctccgtggttaggcagctgtgacgagcggaaggtccgggagaggacccctagtggagaatactttgtgggtagcgaggtgattggctggtcctggcgatatttatgggtccgacggtcctcccgaattttaataaagagcctccagggatcagtggcatcgcgaagaccctaattgtgaacgttaggtgaatagaagtctgtgtttgactaccaagtctatgtctactacacaaggaccactcgatatctcttttcccctgtttttggcctctttttcacgatcatttcctgtatcacgctagtaatgtagccgaatgctagcaatggcttcggtaagccacagcggtctaacatccaatgagtggtcaaagagtacggacacaggccaatgagagagctttgtaaaatgagggctcggagtatactacctcgctatattccagccgctaggtaactaaatagtctgactcttttccatttaaaggggcgcgtgcgtccgtcaattgaattttgcacctccatctctcttcacctctacctttcctttcttttcctacctcaccgtgtgtccaaaacatcaacatgcgtacctcctttttcctcaccgcagctctcgctaccctcggcacccaagccaaggacagcagcagcagcagcgaaatcatcggctacttctctccttcctgggacgcaggccttctccagtatggcggttggaccagcaccgccgccagcctcgtcgcctacaaatccggcacggccacatatcacgtcggctgtctgaaggacgcgcccaagaccgactgcaactacccgtcctcgtggaccatcgttcaaggcccggagacagtcagtctcgatgggaaatacatcgcctctacctcggacaagacctccagctacgagatgactgtctcccagtcgtatcattgttccctgaaggcgtcgaccgagtccgccagctgcacgatgagtgtcagcatgagcggaagcgtcgacggtgcgaaagtcgaatcttctacttccagcaaggcgacttacaccactgccccgatttcggcttcgtactaccagctgaccgtcaccgcgggcctggagtcgattaccactgagacggctacgacgactaagtcgaccggtggtgctgcgggacacgctggtgctatgattacggctgcgcctatggttgctgctgctctcgctgctttgctgtgatgattttcaagatatttcgatcataaggaattacatgccatgactttaattgactgacatcgcgtaaagatctcgtagactggatttggtaaatggaataacgccaaaagtaggatctcttgttttcgtcgtttagcattggtgtaatatcaaaggtcatttctagtttcgccccagcagtgaaaagaccttggcgctgtaatacaagtttctcggagatatatatcttacatacttagtgacgacaccgaactcgagtttctagtttggatatatatttaaacagacaacagagatcaaatcataaacatccatttcacccaaggggtaaaacaagacgtgcattgtattaagcgtgtcaactatacagggaggtaactaattcaggggtctcgcacggtcagccctgctagcaaacaaggaaacaaatcctatgccagcacaagcgagcgaaaacaccgagaacaacctcatattaggtatagatatatttacaggacgtaagcggcagcagcggcgaggacagcaacaccagccatgttgcccttgacattggcaccggcgccagtgtaggtgggcgagggggtggcgccagaggatgagccggtcttggtcactagcggggtggaggtggcaacgccggaggaggagccgacgggggaggacccagtggcggtggtaccggtggaagaggtctcggtctcaacggcggaggaggtttcaacagccgaggacgaggtctcaacagcagaagaggaagtctcaacggcggaagacgaggtctcgacagcagaggaggtctcaacggcgctggaggtctcgctagcagacgcggtaggggttgcggtagtctcagcaggggcagagctcgaggtgctggcgctaacggtggaggaagcgctggtctcgacgggagggaccgagatggggtgaccagcggaggaacactgcccaacgacggcgttggagacagctggatgagtgagttagtgggatgtttggatcaaggggagcaagtagatgggtgttaacatacagacttggtcactgtggtcgcaggccttctgaacacaaggagtgatgctggtcacgagctcggtcttctggcagtggcacttgaagtcgagcagctcggagcagccatcgctctgcaaggcagagatgaagcagctcagctggaagcaagtgttagtaaaccatattctttacatgtaggcatcggttttcttcgtaccgagcaggcgggtacatcgggcagctgggcgctggcgagaccggcagcaacaaaggcaatcagagtggtggagaacttcatcttgatgaattggactaaaaaatagaagatattatgaatggcgtgccggaaaagacagtcaagtattgtatagcgagtgcggatgagttgagaagaggagccaggtctggacttggggagctggatgccctttttataagctttgccagtcgtatatactccgcctgccccatggagatacccctgtgacaaggttgcactcagaggctggcgcgtgggaccatcacatgtctccgcatgcttaatgggaggcaatccaccgaaagcaggcttcggccgcggttgactcagatctgtaattaccacggattggctgagttcaaagccaagcctgaaggctgatgccggataatgggttcccgcagccgattgagcaatgagcgaggattgggttggtgctattgtctcgtacagcgtacgtatgcgcgcatcgccaagttgagactagatcagacgaacgagaaagccaccggaaagactggaccagtggcgacgttggtatgtagtacacttccatttgcggttagtcatacggtgattagggccattgggtttaatttccacatctcgggccagactgctagtggcctcgatggacgacggtacggtacggagtacatgtggcgtggttgtgcagcgttcctactgcccactacccaaagtctttcgtcaattggctataaattatgactccagcatatgtagatacgcaagcctgccagcattgaaagcaataaatgtgcagaaagattcgcaaaaaaagaccaatggggtggcaaaccccatagtattaggaaaatccggggaagacggttggaccccggcagggcccgagagagggtagcatcgaactataccacattgggacttggtccgacgctatttcataaacaaggcaatataatatatcttgtctgaaattgcttggggtaacacacggcgccatcaaggttatggaaagggtcaaaactcaggccacgatcaacaaccttgtgagctacagaacttgtccaatatagggtttatgggtatacagggttgtacattgtagccccaaagacatcccggcgttttctgagtttcattgggcttaatagagaatcacaaactagaaaagattaccgaaacgttagcattctctgaaatatgactcgatcgtgagatattgtacctgcatattacgatcacccccagtggcaacagggtttaaatgttacttccaagtgaaccatttcctgttatttcctaagaaaatggccttggccttgccaagtgagacatttagcgggggtgggccgactcaagacgcagactggaccagatacatcatctttgactttgacagacagtgccaagcacactagcattcatttgtagcgtggggttggggtcaataagaaagagagttcagcaaaagcagcaaaatcaggaacaaaaatacaaaagcaccgatcacatgagacacgactcctagttagcgtcgccaccgagactctgttacgggcgactaaatggaccatcggaacataactctctacagtctttctacatctgcaattgtgttgaccacctaccatatgtatactcttacaaaatcacaaggtcttacgtatgtatcacgtgaccgggtttcccccataagtaattatcctatcatgtgactggatagatacactagtcccaatatggcaagcttattatttctggaccaatcaaaatgcattcatactacactcatattcaggcattgagcatattctatcttagcatccaccttctctatcattatggcttccaaaacatacactagatgttacatttacaatttttgcttaagtgagtcctaagtgaggtctaagtgaagtctgagtgaagcctaggtgaagtccaggtggacttaagcaacctcaagaacggcatgcagcggcttgagaatgaaattcagcagctccaaaagtcatacaagctccaatctcgccaaagtatcctcatacgtggggctgagttagatctctcatgattgaccccgcccatgcagaaatctggaaatgcttcttctatcagcactaccatttgacgttcgagtattcccacgagcaactccgcgattttgtcgatgtctccccttcgatcgtaaagattttcaatttacgggctgatatatcgataccaacccgtgaatggcagaaggtcgaggtgtgcgaccaaaacttctcgaagcctacgatacgtacatcgaagccttccagcagaatcaaattactgcggctccgatggaactcctttcgctggcgaaaagtcgcgggcagcctttttgaggtagtgagaatctcctttgttttctgttttgttttgctttcatatatgataccctctttcgaaatgcttcaattttctgtagcaagatcctacttgcattttcctcaaatcactagcttattacctgcttattcctagccctattttccactactgaatagcagccatattatcctagtgactataggcataccacggcttttctagtagagaaatgtcagaactagctcggtgtccctcaaaaggcaagctgggggtcagaagatcttcaattcaatcatgaccgccgaaggtatcatttctatgaatacccataggtcattcgtatctcattaatatcccccacaaacgcccgatccatgcaagtatgtcaacgccagttcaaatcacggtcccatatgttctcaggataacaattcatcaatatatgctcgctcgcttatatccttccccttgagaagaaccgcaaggacttcgatgggcgggttgagcttcagctgattagcgcgtctccaccgcttgactcgagcaattccaatgcagggctaaagagagagtaaatatgttagacgacttattctaaaagagacccggacacataccccatattggctggaaagatcgaaatgccggagaatcttttcctccacatccatgccttgctggtgggctgttgagcgcaatgagccttttaattcatactaacgccctgtgtgccaacctccacttaccactaggtgtcttgcgggcctgctcttgagcccgccaatatcgccagatatcctgcttgttcaatttcagtgcccggctgtcctcttcagatcggggcgcttggtgttcgactgcggcttgttgtcgcaccgctagctctgcgacatggggcttggagggttcttttggggtgatggacagctgctggggctctggggtggaggcagatttgtcggagagcgctggagtcgagtcgagggccttggctttgtgggatggtgcggtgactggtttggtgactcgagcccgggctccgaaggacagtgtcgactgcgacctgggtgtgtttgatgcgcgacgaggcataatgtagaataatgtggtggtttgtcgttgagattggatatgcaatgttgaagaagttaaggtggagaatgaggcgatgtcatggttgcactagcaaccaagggaaaaatctacgaaggcccggtatttagccttccatggttcttaattgggacgttttatattttttatataaattatacatcgattggcgtataaatccacagcggatgtgctaagatttattgtttatcgatttaccatgtgtgatgacgatgatgacattgacattcgaaactgggcgaacagtgtccgataaccattacgtctggtagaaattcgagatcgggtagatcttcctaaatagtcgtatatatagcatattagacctctcgagatatacagaagaacctaataataaatcaaaggaggctcaactcaatcgtggctgttggggggctcagttcatctttccccacccacagccactgtacgttctggaagcccttcacctctcctatctcgaacctcaaagcctcaagacctctggacaacttacccttgtcgccctcttccaacctccggcattcgaggaatccatatgttcacacagttcacctaacccaccgaacccttatgaaccgtgcgaaaggatccgtccactcgcatattccccacaacccgaccaacctccgcatgtctatggtgcgacagacacggcttactcgagatggccgcctttgtgcgcgtatcagggccggcaaacggcaatttcctgatcggatacccaggcatttctgcgaccatggtaagcgccctgtgatacatgcgacgagccggttcggccccctgcgcacgcggccccattgattgttcattgactgactatccaagccacgaatcgagggtaaagttgaaatcagaccctgcgctggtattacagctcccgtcaacatctccctcgtcactatttccctcctccgccgcgagacaatccacccttcggccgacacctttacgaagaagcgcctggctcccccgcggaaagagatcaccgatatcgtcggaaaagagatgctcctatttcgatgtcccgccggccgagaatacgaggaggtaatatctatggatctgccctttgttctctttattccgtttggtcgtggcggccgcgatgcctctcgccgtgtacccccagctagtttacagctcccgagtcgcaccgccgagacctactacgagatggtggtgatggtccaacaagggcagcagcagcagcacaaatatacctttcccgttcctatcgcccgctacgacacgctctccacattcggcatgtacaatcgtccagagtcggcagagcgcgtatcagatcatctggtcacattagccatatcactgccacggtggtcttacggtcctctcgaccccgtgagcgtctatgtcaagctgtcaccgaacgagagctggatgggcaaggcgcgtaaggtgaccatcaacaagatcaccattggcatcgacgaggaaattgtctacaaccacgaaggcgatgagcctcagcgcaaagtcaaggtcctagctaagaaaacggagaacattggtgttaaactgccccaatcgggctatttgacaaaccttggtctggtattccccgccaaggacctccgcgacgcagaaggaatcttgccgagaagtagggcggcatttccaacgtacggtgtgagcggtttcacaaccacagcaagtctatataaaatcgagtattacctcacagttcgagttagttcttccctagttccctggtatttccccaatactcacacgacagcaggctcacttaacctcggcaagagacattaccattcgacaaccaattgtggtctgccccctcgaccatgccggctgcaaagaagaaatggaagcgatcgagcaagccgcacgagatgccgcccacgtcaacccggacaaccccatgctacctcttccagcaattgtgcgaccaaacgaccacaacgccctcagccatctaggcgccgctatcgtcggcaaccagaagaaaccattgattgactgagatggagatgatccaactcctcagtaccaacgatgatacttatttaataaatccctcccttccccccgtcttgataccggagctcctggacggtaatcccacatacggggaccgacggttgccattacttttgatgcggaggctgaaggctcctccgcaaccacgctatatcatgacatgtcttacgattgcatacattttggagttggttgcgtggcattcctggaaactggctgttcgctgtttatctgtctgggcaaaacggggattacggggtgtttgggctacttgtttggagatttggtcgagtgtttccttgcctcccttgacttctttccagtgtctccccgctgcatacgtgtattcggtcttttagccgtttggtgcttctttcattcgcacagacccagtcaagcatctgctcaaatagtgatacaatttgtatccatttggaatcatgtacctattaatctgtggatatacggagctatggatctatggtttcaggaatcatctatcctcgttgctgtgtatattgtcttttggaatgcaaaatcgcttcacaagggtatacttatgctagtttgtatgcctttccaggttcctatccccctcgaccacgaccttatatcaccaccctatattatacatgcagcttatttcccaatttccagaaatcccatggcaatgcttagcatgtctccgtcaaccacccgggctttgctcttctggctctcgttctcaatgccccgaagacattctttcaacatttcaagtatggtttggtactgcctcgaggagggtccaaaggtcttcagggcattctcaaggctgtttgatatctatattttgttatttcctgcgtttcgtagttgtactgggcgatataccttgcgcaaactttcgttatagtccacgagatcttgacttcttccgtccatctcatatcatccaacaaatatgcctgatatttcgaaatcaaatagcttgactttgtgaggggcatatatgtccaactgaccgctctcgtcaccgcctagttataagaggcaaatcgcccttagccgggcgtcggggccacctccagctccctctccacttaagctcggggctgctttagctacctttgtcccttctgacatcgtgtctttactctacgcttttcaatcaactcatctagcctcttgagaaagctccctcctcttatccaagcccgaaatgtacaaaaaaatcgtcggaggttgcatccgattatttgtggtcgtcttcgtcatcattgagattgagaattacaccaacctcattgaccgatacccgatagcttgtaaagttgcatttttcctagcattgttcggctttttatggctctatggcatgtacagagatccggagtctgaacttaatcaagacgacaaggacccccgacattgaggtttgcaagaaacgtttgcttttcgacaaaaggctggaaatatacacaatgctatgagccgatggctttccccgcgatcacaatgcgagatgatgcttttaatctggcccaggcggcttggaaatctgaccgattccttgtttcttgctgtgtttgttctcttgaatcacttcaatagcttagatcttatcctcactaatattcataacgtacttactctaccgcctgctccataaatactaatactacaaacgctagggtgcttacatgaacctagtggctcttcaacgagtcagtatcattcttactgctgcttctataactgtagtgacctatttcctgtacttaaagtagcatttctcctataggacacaccgttcgggttcgatcgacttcgggtcgaggaccctcgttactgcatattctttccaaaccaaaaagagcattgccaagattgaggagtaacagactgcgttggaattgaaaggtccaagccaatgaacgacgtccaaaactgccagcaacacggagtatccccggggttcctccgcatctacgatttcacaagaatgacctccagcatatactccaacatactccgtatacttgtaggtatcgcggaagttgtttgagcagcatttcactagttatagttaagtcagcaggctggtggaaggtgcttcgcaatggagattcattctccttcgtccttgattgagatctacatagtccgagccaaccttgcaataccccactttgatgccggggtaaaacatgttggggtaaaagatataaaaaggtatgtgtttccctgattttgggtttgaattcccagcagcacagctaaaatggttcacttatcaaggggtgttgtggccacatgtcttactctccttgcgcattcctccggtattacggctgaagaatcaagcacaaatcgtgagtcctgtgtttctattagtttctcatttcctaaacctaaccacctcctatagcaatcgtggcagatggtacttcctttgctctcaatggaaataatgttgcataccgcatccatgtagacaataccactggtgatctcttaggagaccacttcggcggctctgtcggagctcatatccctctggaagttgtaggcgacgtccatggctggaatggttatatcggacgtgtacgccgcgagttcccagaccaaggccgaggagatttcaggacccctgcgattcgcattcgtcagtcacaagggtataccgtgtctgaattccagtacaaatcgtacaagatcatccccggaaagcctgctctacctgggttgccagccacgacgggcacagaagaagatgtgagcaccttggttatcagtctatatgacaagtacagcgatgttggtgcagacctctcctactcgattttccctaagtatgatgccattgtgcgcagcgtgaatatcacgaatcacggaaaggcaaatatcacaatcgagtctctggcaagtctgagcgtggatttgccgttcgaggacctcgacatgataagtcttcgcggtgattgggcaagggaagcgcatcgcgaaaggaaaaaggtcacgtacggcacccaaggctttggaagttccactggctactcctctcacctccataaccctttcctggcattgacagagccttccgctaccgagtctcacggagaggtatggggattctcgcttgtgtacactggttcattctccgtgaatgtcgagaagggctcgcagggcttcacgcgtgcccttttgggtttcaaccctagccagctctcgtggaatctgccgcccggggaaacccttacttctcccgagtgtgtctcagtatactccaatgatggcatcggcggaatgtcacgctctctacatcgcctgtaccgcaagcatctcatcaagagcaagtttgccaccagtgatcgtcctacgttgttgaacagttgggaaggactgtatttcaattacaatcagagtagcatctacgacttggcaaaggaagccgccgaagtaggtgccaagctctttgttctggatgacggttggtttggccgggaatatccacgtctctccgacgacgccggactgggcgactggatcccaaaccctgaccggttcccagacggcctggggccgattgtgaagaatatcacggacctgaaagctgctaactcgtcaacgaacatgcgcttcggtatctggttcgagccggaaatggtcaatccgaactcgactctgtataacgagcacccggactgggccttacacgcaggaccctaccctcgcaccgaaaggcgcaatcagctcgtgctgaacctcgctcttcctgaagtccaagactacatcatcaagtccgtctcagacgtcctcaagagtgcagatatcagttacgtcaagtgggacaacaacaggggtatccacgagatgccttccccggccacagaccacgcctatattctcggcatgtaccgtgttttcgatgaactaacaacccaattccccgatatcctctgggagggctgcgcctcgggcggaggccggttcgacccaggtgttctgcagtacttccctcagatctggacatcggataacacagatgcaatcgatcgcatctccattcagcttggtacttcgctcgcctacccccccagcgcgatgggtgctcacctgtccgaagtaccgaaccaacagactggccgcacagtcccggtggctgtccgcggacatgtcgcgatgatggctggctcgtttggcttggagctcgatccggctgtaatgaacgcggaggacaaggcggctctgccgggtctcattgctcttgctgagaaggtgaaccccattgtccttactggcgatatgtggcgtttgaaccttccagaggactcgaattggcctgctgttttgttcatcgccgaagatggtcagaaggctgtgttgtttgtcttccagctcgctccgaatgttgatcattcatggccacgcattaggttgcagggattggatgcgcaggcttcctataagattgacgggggtgtggtttactccggtggaaccttgatgaatattggtctgcaatttcctttcaaaggtgactatggcagtcaggttgtgatgttagaaaagcaatagagggcacctgcaatatgggctcgatatttatatttgagaggcaagggctgtgagcagtcacactctttggtaggatttgactcctgaacaatcgaatatcaacccatacaagattgtccaatgacgagtttaaatacccacatcaggaatattcaattcaataaacgtgttgaacgttgatgccatagacattattctgccggacgtaaaaagatccccgcttatcgataagcgcaacttttctgatctccgactctgactccgaaattctagcctctcatttattctttgcaaacaattcaacatggcagacgcagacgaggatgccgttcgcgcacctgcaactgcctcgacagaacctgatatcgacctgtccgatgagacgcaggatttccgcttcttgaaccacttaaatttgtatgaacacctctccgacatggcgaaatctccattgtcaatcgcttcaattacccattgcttacattcaatctctcgacagttttgccgattcctcccctagtatcccgcgccgcggcgaaaaagactttgagcccaacccgacagaacttcaggccgatgtactctccgcttcgcgaggggccatgcacaatgcgctctcatacccccgtcttcacggtgccaaaactcgcatcatagccttctacgcacccgacgggtatgttcctccagttcaaatcgatcgcgcgacaccgaaagctagcggagaagatggaaagagctcggagtctacccccaaacccccgaggcctttgcccaattctgccagaatatcgcctgacgcatgtgtctatgtgcccaatccgaagggccagttctttaaaacaatgggccaggcagattcgacaagtcgtatctggctgttgccagaggaagccttatatctaattgagcgaggaagtctggatatcagatggcctagcccttcggggtctacagaagacctatccgtccctatgagcttgcaggctgcatatgcgtgcttcatgggccgcggtggtctgacgctagaacggtactctgtttatactggtctcaagcgcctgggttatgcgctcgtccgagctcctggatggtgcgacgacatccagcagcaggatgcagatgctttgggttctagtgaaataacaccacccaaaatacatggccccggcctggctggtatgcttgcatcacttttcaactggattcatgaccctcactcaacggcatctacggcaactggccctataatcggcactggcattcaccgaagttacagtgagtcacacatttatctccgcgcaattgcctcagttctccttattgacaaaattcttagtggatgtataccgcaagctcgccattataccctggtacgacccagtcaccgcgcccgagagacacccctttgataccacaccacccttccgcgtcgtattccacatctacaagccctcaactcccatcaaaaagtccgcgcttcccactccagacttccgcatcgcggtcgtcagcacacgcgaccaaactaccatgcccactatgacacaacttggtgctttgctcgaaagcacgccacttgaccctccgcgtggggagaaaatggaccgtatgatgtacatgagactgcggcatggataccgcaatgtcgtcatggctgttgtcgatcagggtgtagtcagttatttgcgaattgctgattcggcgttcgggaaggagaagctttatgagaacaagggtggacctcagggtcataagcggaattatgcgaatcagaagtcgaggaaacgttgagagactcgggttatcaattcatgccttggtcgattacaagtccgttgctggagagaaggcagcaatagcctgcagcggcaatgccgtttgtgtattagaatcgtgcacatactatggatctggcccgtatatccacctcatgtcatcttgtccggtgtggatcacagcgagagctgaaaatgctctccgcggtggttggagcaattggggttcttctttcgaagatggcctacactggtcaccgcacttcaacagatagctctcgttttgagctcggtctgattacacattggagtgaagatctatatatcgttttagcattttcactagaagaatgacccaagcttatcagctggtacatattttctgggccatttaagtaccaaggaatttacatagtcggatactactcatcaagatctaaaaaccacaatatcactgaatcataaatcataacattctctgagtaacattcccccgtattcgacgagtgactggagtcttgcataccatgcaatcatctagcacatccatagcaaattacatccccaaatcacagcctgtacatctcgctcttacttctcgccccatcaaagacacaagtattatcaagcggaccatactgcctggtaatcaccttcaatgcctcctgcgcaaccaaaccccccgtcaaagaagagatattatgcaactcgccgccctcagcccgacgcagttccttaatcgcgctggcgatctgcacgcgcgcctcctgagaaaccgccgatccatccgccgcagtcagcagagctaggatccgttcggtgtggctgttccacagcccgtcgtcgtcaacagagcggtcctcttcatggccgctcgattggatctcgtccacgaccgagtcgaggatctgcgtggcgatgaatatcggaatcagggtgtccgggacgttgagctcgttgcggatggttttcagtgttgacgcgtcgctgtcgatacttatctgcgggatatcgcggccgagcacgactttgatgtgtgcggcattcttgcagaatacttcgatatctcggtctgggattgcggaagtttggcgtctgagattggattcaagctggcgcactgttgttgtcacttcttccacgtcttgtcgcgctttggccttgtatatgttttgtagtgagacgtagtctgcagactgggctttcatgtctggtagggagcctgggagggggaggacgccatgagacgcgtggaaggttttgatggccgaggcaatgacccagaaatcttgggatgatgctgacagctgttgacactggttcatgtcgaaaacctcacggatcgagctgcgtaggctgaatggcgcgattgtcttaagtacagcagcgactgcctcatcaaaattctcttcgccgccttctgggttagaagtgcgtgtctgggaccgcacaaactctctgaactcggttttctctttgtagttgctcggtgcgttgccttcgtgagactgtttccattgctccaggaagtgaagcaggagaagtatgtagggcacatggccgtgctgatggtcatccagagtgtctaggttgttcagattggctgcagcggcaacaagctcaggccagggatttagcagacgcaggtcctgggttgattctgggtccggatgtgtctcaacaatggggaattcagccggcaattgcacagagaaggtggaatagaacccaactgagtgcaggtacagcacggggatacctagctgctttgcttcctgggtcagaggtaccagggtcgagcgtctcattggaccggaaataatcaccagcttgtgctggggcaagaagtcagggtctacaagaagctcctcgatgcgctgttttataagtcagtcaatgatcatctacttttggagacatggagacatgggaaatcacaccttgagatagtaatgtccctccacgtctggattcagttctttcagcagtcggcaggtttcctctgcacgggacttgcccagggacccttcttccaggaagaaattcacgcccagatcagactcggtgactattgctgggtcgacgatagtgaaaccgccaattccaggcagtacgagattcttgagtgtctcaacgccggcaacaccggtgacaccagtgttgtattgaccgagagggccatctgagttcaccagcaggacatgagagtcctcaagtgcttgctggccagtagctgcccacaggcggagctggcgatcatatttgcgctccttggaggttggccctgtcagggcggcggggaaggcatccgtcatggtggatagtagtgcgggggaggtgatagagctttggtttgaggctcagaacattgcctgtctatcggtatgtgatgcttctcgtgttgcttacagtatttgctcttcaatcatgcaagttcctaaatgatggagcagtggatgtcgacttgttgatacgcgactatatttaggtaagcgcgtgttgtggcctgataatccaggctgacacgcagagcctcattggcattgatattgttctgacggtctgttccatagctagtttattgtatatagacaggtttctgtccgctgcgaggaagattactcccaatccatgaccaactactacgacccctagcttggagttcttagatgatgaaatgaggtcattgccagagggaaacagatatagccagcttccatgctgttaaggatgtttatttgtgatttacccttgctttgttcattgctatagtattcaatggagttttactttataaatgtaaatatattgtggcattcttgtcggtataaagagtatactattcgggtacttgatccgatgtggacttatacttcctgttgttcataccacacgactaataatactcggttatattacatataaccttgatcaatgctattgaatgcctaggcctggactttataggggaaaaaatacctgcaagtgctaaaccgcacaacctgtaacgtgacgttatagtggccataaactaaagataactatagattctatcttttgcttaattccatttcctcctctattttcatttcccctcaaaaaccaccaattccgttataaagcgcgtctataaagaggattccatgatccaaccagccctcatctcccctcttttcctctgccgtagacttaccctccccaccatccccacactacttcacagcactttgcaaagtcctcaaagactccaatccaccatgtccaccgtgtctgccgtcgaagaagccaagcgcgccgccgcaaaggtcgccgtcgaaaaacactaccccaagaatgcccgctgggtcggtatcggcagtggtacgactatcgtgtacgtcgtcgaggccatcaagaacctgggcgtcgacacctccgctacaaagtacatcccaaccggttaccagtccaagcaactgatcgtcaaagccggattaacatccgttgagtacgacaccattccactgggaacagtcctcgacgtggcgttcgatggtgcggacgaggtcgacgaggatctgaactgcatcaagggcggcggtgcatgcttgttccaggagaagatcgtcgctttgcaggctaaggagtttatctgtgttgctggtaagttttggtctggtctaatatgattttatttgcatttgcattgtagttgcgggggtatgggatgctcggaagtagagccaacactttttcttcttttttctttctttgctataaccccctactaacccacgctcgcaatctcagatcaccgcaagctccaaccccgtctccttacaaactggaaatcaatccccatcgaggttgccccgatcgccgcccaccgcgttatcctcaagctgcaggaactcggcagtatcaacccggccatccggccatccgcgagcgccaaggaaggtcccctcaagaccgatcagggtttcttcattatcgatgcccccttcaagccattgctgatcaaggctgatatcgaggctggccaggacggtagcggcaaggatggtgtgtgggaggttggtaccttggctcgcgagatcaaggagattaccggtgtgcttgaggtcggtgttttccaaggccaaaccggcccgcaagctactgctgccggtggtattggaggtcagcggcctgtcgcggcctacttcggtatggctgatgggacggtcgctgttcgcaaggccgatgtctagtggttggactagactacgtaaataatgtagatgataccaggattttcttttttgttaaaccttgggaaaaaaatgccatgattaaatttaactagtaaaagcttgcgattgtgttttggaatttctttttaattggatttcgcgtgtggtatcaacattggaaagacgcttcatttcagtatggaatcaagaaaaggccatttcgcctggacctattttgcgctcttactcttgcctttggcctccgtttcgcctaactcccgaacgtaaaccttcactgtgccttcggggacctcgtcatggccgtcttcgaatccaggactgactgcaatggccaagtgctggccactcgcactgaacgcgagagctgcgacgctatgttggtatttctgatattgacggatacggcgcttagagattccatcccagagcgcaacaacaccatcaccaccgccggacgcaaaggtgccaaagatagggtggaaagtcaatgcgttgacagggtagacgacgtccacgccatcgtcgccggtctggcggtgacatttaaaagcgtatttgcgggcctgagattcaggcgacgggtcgaaccattcgaccgcaacacgaccctcaatgctagacgaggcgtacccagcgtcatcaggcatgcaggcgacggcgcgggtcatgaacttcaagctgctctcacggcgctgccagggctcaacttcaactcgattactgcttgggtcggcgctatctgcttctgcggtgagaagggccagtgctttgaggtcgtagatgtgcaatgcgcgcgatgccatcgccacgaccagcttcgtggcagttgcggagattgagaatggcttagacgggaggggaacgataatcggcagggattcgaggtttgcgccagtatcggcttggtgaatgtgcagtgtggagtcccacgaggcggagatgacgagcttgtgctcgcggctgtataggacatggcgcacgccagcttcgtggctgctgagcacggtctgttcggaggtgttgaggtcgatcctgattaattagtatattccatggattacaagcggggtgctgatagtagcaggacccaatggaaacaactcacttcctcacgtcccaatccagtccagctgtgtagatctcattctcggtctcaccgaagcagacgtccaggacaggagcgcggtgctcgaacttctgcaatagctttccctctccaaattttccattctcatcccgcaagtcatacagatatgcgttcttatcccatgaggaaaccacgagtcgcgcggagttggggtctggggagaacttcaaggccgagatagcatctgtaggtggggaagccaaagtgaattgatctgcgacaagaaattagacatgattcaaatcaaaaagcaacgccgagaactactcacgagaagtcatcttgggcgagctgcggagttgcagaagatcaacacccaagctccccggggcccttaaccgtcttcttttctgccatcgtcaccgccctttgattccccgctctacatcgataaggaaaaaagaacgtcctgacatcatttgcttttagcacaaacacaattcctcacatcttcgtgatattgataagatgccttttgcccagctggtgattggtccgccgggcgctggcaagtccacatactgcaatggtatgcatcagttcctgggcgcaattggccggaaatgctctgtcgtcaaccttgaccccgccaacgacaagacttcatatccatgcgcgctggacgtacgtgatttagtcaggctagaggacatcatggaagaggacaagttgggtccgaacggtggtgtcttatatgctcttgaagagctcgaaaataattttgactggttggaaaacgggctgaaggagcttggtggtatgtctgacatgtcctggctgcatacatttactgactggtttgatgaattctcagaggattatattcttttcgattgtcctggtcaagttgagctatttacacatcatacttcattacgcaacatcttctacaaaatccagaagatgggcatccgggttagtggcagcaaatcttccagcggaacacaaaggaaagtcagctaaccagactcctcataacagcttatcgtcgtccacctcgtcgactcctacgccctcaccctcccctcaatgtacatatccgccctcctcctctccctccgcgccatgctccaactcgacctcccacacataaatgtcctcaccaaaatcgacaaccttgccaactacgctccactccctttcaacctagactactataccgaagtacaagacctgtcctacctactcccagaattggaaagcgagtcctcacgactttcacacgagaaattcggcaaattgaaccagactatcatcgatctggtcgaggaattcggactcgttgccttcgagacgctggccgtcgaagacaaaaagagtatgatgagtctcttgcgcgctattgaccgtgcatccgggtatgcctttggtcccgccgagggcgccaacgatactgtctggcaagtggctgttcgggagggcatgggtgtcacagacgtgcgtgatgtgcaggagcgctggatagatgccaaggatgaatacgatcggcaggaggagatggatttagaggaggaagttcgtgtgcgcaatgcggcgagccaggtcgaagcgacgggtgccgtggatggcggacctgacgaggatgacggccatgactacgacgaggagttggagaagtggaaaaaggatatgccagacagtggcgtgcgggtgcaccgcaagtaatcatcctgctccaatgacttccgagctgttttaaacgtcagatacgatacgataaatgtataatagccgaaaataaccatgcataatctaacgcaccaaaaaccggggtatctcattaaaagaaaataaatgtacagtaaaactcatcctcacacaatctcaatcatccatcccctcattctcactctcgtccataacacagtcaacgacatcagacccaccaaccaaccccccaagaacccccctctcctccgcctctttaaccctaacaatctcccgcctagccctccgaatagcctcctcctccgccttccgcatcgtccccgaaacccgaaccacgcggaacacacacccacgctcacgtcccgtccccgcgcgtttctggccattcgccggctccggaacgccggacatgtacgtaagcgccgaccagacgaggcggaaggaggcgcgcggacaccgtactatagcggtggacgttgctggcgagaggtattttactatatggtgtggttagtggttggttctatggatgggggagttggatgtgagggcctagggaatgaaaacttactcgttattccgccagcggaggcaccgcctagctttccgatcccccagtcgccgtatagctctgcgacagactcgcggatcattttcgctaggaagccttgggttagggcgtcggaggttggggagtggattgctagttgggggatgtgcggttttgatgttggggttgccggccaggtttttgggtctgggtaaagaatgtccacgaggaggtagcggtttttgaggcggaccatgacggtgttggtgtggttgtattatgttggtggtgttgacgtgggttgggttcgggttgggttaaaaggaggcgaaacttgaaaagcagtacggatagggtactggtggatcttttgagttatgcgagagctgggtatagacgtagttgctgagtagatttatgtcaaggtggattaatcttgaagctgtgaccaaaaatccactaagcctaattaggatggatagatatccatgcatataccttttcgaatatccacgtcaactcttctcgtctcgactctgctcatctcaaaactcacctatctttttcaatatggctgtttacacccgatcatcccctcttgttcaacaaatacagcaaagttctccatgggtagacatctacaccgattctgctaccagccctctccgtgtccgatcagtcacgcataatatcagttctgtctcacatgcacacccagagcctagaagatggcagaacccaggtggttgggggccaagacatatgaatgacacagctccttttactttgtgggacgacactggccggaaatatcgtttgccaactaaagaggaattccagtggattagcaagaagtttggcgacggaaagatctctctatccggttggtttatatgcattgcgaccgataacccgccgaagccggttcctcttacactaggatgcatgccggtgatgtttgtcggagtcaatcaaagctttcttgagcccttgcccaaagcaccttatcctaatccacgattaccggacccttgtcccgatctacgctggccagcaatggaatttccaacagatgcagataatatcacttttctcgaagcactggagccgttggcccatgtacgtgctgttatgtatctgccttcatggattatcattgagcttgagtatggagattcccgagtttatgaactcaagtcccttccagggattgttgctggacgcacagctctttatcaccatgcagtagctcccttccataagaagatgaagaatcttacccgaggccaacagcttgatccagctgaatcccagactagcttgagaccgttaccgcaagacactcacaattatcttcagtactcatttctttctcctggacacagaatcgaatctggctatagcctatcagactccggctatgagtcaacgacccgtgcttcgtctgctggagtaaaactccgcaattcgaggggagaagaggccctaagtatcgcttatcacggcttccccatttcctcggaggtctatcatctagatacccaccaggaaataattggagatgtgatcaatatacgacctgaactagatgtggccctcgttaaaccgacctctaccgcgtccacaaagtttaagaacacctgctattttcaagcacaaccccctaagacgttgttagaaggaaaagatatcagggcaggctcatgggccgaggttgatggcatgagttcaggcttactgaacttgctatcatatggaatgatgaaggaaaaacccgtgtctggctctccaaaaattccgttcgcacagtggcggtcattcaatctccagacatcttggggagttgtgaacgaagtgatcgctaaaggtatctgcggcgcaccgattgttagctgcgataccagcggggtgaccggcttcttccatctttttgatggaatgaactgtcttagtgctactctcgatgatttggtagctgaaggatggcaaattgcctgaatggccagagcaccgatggttaggagcactgatgctcatattcttacgagcagtatctatataggtaagcccaatccaatatttaatctagcggctcaacaatgtataatgctatgtaactcttggagaggaagctatacaatgtattgtactatctggactgctcgactggccctccacaccatctaaatgcctttctagttgcctatttgaactaatgatagtagtttttcggtactctttttatgtctttttggcatggttgaaaattgcggccggcggtagatatacccaagtagctagcggggagtcttttcccctgaacataacgaatgctatggactacgcagaaaacatctatgcggcaatggcacgttcattatttcccaaataggtctagtcatctactgcaaacgaattaaatcagatccatagcctggttgcacccttcttgagtgtcaacctgtcaacttggtcatgccacatgaacgcaggtacatcgatacacataactgctcagaaaacataagaaaagaaaatcaagggatgaaccatccaaactccaccgtcctgaacggacggactatatgccagcggacggcgttgcaaacgtcataaacaaaatcacaggttgacctcaacacggccctcggcaccacccttctgcagtgtggggaggaggtaggtgatatcatcccaagggtggcggtagagaccggtgcgcaggcgcttctgatcgaggtagtgggcaataagaccgatggagcggccgagcacgaacagaccgttgaggacacccatgcgcatgtagtcctcgcactcctctggggagaaggcaccgcagttgcggaggaggtcaacgaagcagacagccacacagccgtcgacgttgaggatcaagttgtccttcttagaggtggtgacagtctccacggcgatagcgtagtcgagcagcttggtgctggggaagtgcttcttgacaaactccttgacgagctcgacacggagatcggggttattgcgagacttgaccttgtggccaataccggggataagcttgttctccttgcgcatggtgtcgacgaagtcacgggggctcagacccttgtcaaaggccttggtgaactcctcagcggcgccatccagggcaccaccgaaacgcgatccgatggtcagcagaccggaaacgagagcgctgataaggtccttgccagcacgggtggtgatgatggtgttcatggcaccggagacggcaggaccgtggtcggcggtcagcatgagaaccatctcgaggaacttgctagcgtaggggggcaggcggcgacggaaccacaggagagacatgacaccaccaatgccaatatcctctttgaagacatcggagatgggcataccggcatagagcagctcctggccacggtcgtcggagatggtagagatgaaggcagcgggtttacggacgagaccgagctcctgggcccaggagtagtcgatgggaatcttgggcaccacgggctcgggggcggggacgatgttgcctttctggagctcacggtcatagacctccttgagaatctggggaaggtcttcgaaggtctcggggacgtgaatgccagcttcacgcatggccttgttcttggtaacggcagtctcgagatcagagttagcggaggcaccggcgtgaccgaactggacctcggtcttgaacaagctggcgcaagttccaatagcccaggcgacgatgggcttggtgatggtgccgttcttgatggcctcaatcacacggtactcctcaacaccaccgacctcaccgagcagcaccagaatcttgcactcgggctcggcctggtagcggagcaagtgatcgatgaaggtggtaccggggtaacgatcaccaccaatggcaacaccctcgaacacaccgtcggtgttctgggagataatgttgttcaattcgttggacataccaccggacttggagacgtagccgacagaacctttgcggtacaacttggaggcgacaatgttgtccatcataccaccggtgttgccgatcttgaacgcaccgggcttgataccaccaacagtggcgggaccaataatggtgatgcccttctccttggcgatgaccataatctcacgagcacgctttgatagtcgttagcaatacatccgagatcacacggggagaggcagaacttacacgctcgggcacaccctcagcaataatagcgatacagcggatctgggggtactccatcaactccagggtagaggtgtagacggagcgagaagaagcgaagttgacaacgacgtcaacgtcggggtgcttggccatggccttctcaacgtcctggtagacggggagaagggtctcactggtaccccagtacatcttgctgacgaactggccaccgaaggtgtagataatacccgctacggaaggagtcgaacgcttgcagatgaagtcgaagtcgagcatgccctgcacggctcggggttgcataccactgatcgctggtcagtctcttatttcgagattgtaggagcagaatcgcatgacttactacacgaagcatcgtgtcttgttgtggaaaaggctgtgtagggcgggcgagaggacacggctaggaggggcgaagcgggtgatgttgtcgttggcagactgcacgccgttgccagcggaaagagtaggggagggcatggtgaatctaggtctcaattagcatgccagttggattgcgaggcaattggccaatggtgcaggcaattgaaaagaaggccgtttcgatggtggatatgcaatggataagagggggaagaaaaagaagttactcactttatgcgttaaacaagccgctcgatgcgaaattagggtaaataaagaaaaggaggaaggggaggaggtaacacaggagaggatgagaaggagaagaagctgttgagaaaaatccgcggggtgagatactcggagtactcgcagatacaccgtacagctcgtcccagaccgctggactcgagcagctcaacacttggcagtcccgaaagtaccgggttcggacgataccgtacccaccggtatggtattatggtacaggtaatacgaagctatctggagtatgggggcattattggaatcctgatgcgatagtacatccatgtgtatacgtatgtatagttagttatattctaccttgaataagatagtatatatagtatatgtagtctttttcttcccatcttactgaatctgattgaatattaactcgaactatgtaccgttatgtactatctatcataagtttatccgtgtagacccgattccggaaagtcatgacatcccagtctctcgactcaacggaatcggagtcaagtgtatactccggatatacctcatagtcagtagcaccagtggcgccaccaggagtacctcgcatgtattctcaatacacgtaacattgtggtggagacctcccaacgagacctttccccaccttcgatctccgttcctcaacaggtgggaccggccgagttgtacgctgtaatctccagaacaacttttcctttttttgtgtacgccgtacactacagtacattcccacctttttccctctcactttcttacctcccagtccaattactcctctttatcctttcttcttctctcccatctcccatctcccataatctcatcacatcatgtccgccaaatctatcctcgaggccgacggcaaggccatcctcaattaccacctcactcgcgccccggtgatcaagcccactcctctccctgcctccgcaacacacaaccctcctgcccgcctcgcatcccttcacttccccgaggataaggctgttaaggatgtccttgaccaggcggaggtctccttcccttggcttctgacccccggtgctaagtttgtcgccaaacccgatcaattgatcaagcgtcggggtaagagcggtctgctcgccttgaacaagacctgggctgaggcccgggactggattgaggctcgtgccacgaaggatgtccaggttgagactgtcactggtgttctccgccaattcctggtggagcccttcgtgcctcacccccaggagactgaatactacatcaacattaactccgtccgtgaggtaagctttctccgcatttcgagcacaattgaaaggaaatggaagctaatacccaattctagggcgactggatcctcttcacccacgagggtggtgttgatgtcggtgatgtcgatgctaaggccgagaagctgttgatccccgtcaacctcaagcagtacccctccaacgaggagatcgccgcgaccctgctgagcaaggtccccaagggtgttcacaatgtcctagttgacttcatctctcgtctgtacgccgtctacgtcgactgccagtttacctaccttgagatcaaccctctggttgtcatccccaacgctgacgccacctccgccgaggttcacttcttggatttggccgccaagctcgatcagactgctgagttcgagtgtggtaccaagtgggctgttgctcgcagccccgctgccctgggctcccctgtcctcgcctcgaccagtggcaaggtcagcatcgatgctggcccgccaatggagttccccgcccccttcggtcgtgagctgaccaaggaggagaagttcatctccgacatggatgccaagaccggcgcctcgctcaagttgaccgtcctcaacgccagcggccgtgtgtggaccctggttgctggtggtggtgcttccgttgtctacgccgatgctattgcctccgctggtttcgtcagcgaactggccaactacggcgagtactctggcgccccgaccgagacccagaccttcaactacgcccgcaccgtgctggacctaatgctgcgtgcccctgcccaccccgagggcaaggtcctcttcattggtggaggtattgccaacttcaccaacgtggccagcaccttcaagggtgtcatccgcgccctccgcgaggtcgccaatctcctcaacgaacacaaggtccagatctgggtccgccgtgccggtcccaactaccaggagggcctcaagaacatcaagtctgtcggtatcgagcttggcctcgacatgcacgtctacgggcccgagatgcacgtcagcggcatcgtcccccttgccctccagggcaagaagaccgatatcaaggaattcggcgcataaacagtttaatccttattttatttgttctttgcagcgtgtgtccgttgcatcggtttgtggtataatgcatggcatgatatgacttgttttttgcgggattccgggggaggtctgcgggtgtagatgtcaccccggcgtcctattttgctgagggtatggcgttacttccgcccgggcgacaagacccggtccttctggtgccgacgtacatgattctccgttgattagatttcattttcctatgttcactcccggcggatttagatcgagtgatgtccgtcggataatatcaatgatacgcatttattgtcccagattgttccattgtagttttattatatgtcaacatgaagccagtagatcagatactgtatacgtccagctaaaacatgtccaatgcgaaagtaaacatctgaaaacacaacaataggacaaaccactgcccaaaaataccagcgtaattaatacatacagatacacctgtaattttgaataagctcacatccacgacccaaaagacaaacaagctcccgcaccagactccacacaagctctcatgcaccccggattgccagggccctcagatcccgcgatcagatccgtggataaagtagggactgtgctggagctggggaccataccgaggtgtggacgcgacttccgctgccccgagattagggcaagataagcatcggacgaacgggggctaacttgttcttatattcaaaggggattagtgcctgtggtgcttggagttgggttgggaagtgggctaatgggatataatatgcgttttcttcatgtaggttgctctttcttgtctgttgagttggtgattgtaggtggtggacggctctggcgtatcatcacttacgcgtgtaatttatgtctagctgcggccatggccggatatgagtgctggtttgaaaccattggattatcatgttggatcagttagactgatagaaggtttctttgttgtggatatgctctaagaattcgttttatattgacgggcgacgtgtgcctgagccacggtacaaagaagccaggccccaagtagaagtggcagagctctatatgtggtatattgttcgagaagaggaatcgtcactcgatatatttcaaagggctagccaggatcatgtctgtactggctacataatcagatgaacctatgtgcatagacaaggtcatttttagttgtgattcaatatatatcttgcccgatatcatataaaatgtagtatctgacacttaccacaactgactacgtgatacaattattactcaatggcgctgttcaatcaccaccagcaaccgatgcacacccagtacgctatgttgttatccgtgagatatatctcctaaccacttcgctgtgagtacccttgataacgctaacgagcagatattgaacagtctaagaaaggtcgaagttgcgaggatcaaggatattcagaagcatcccgaatatgactagattgagtgttgcattgccatttgtgacaaaacctagtctccaaagttcgaacgccattcgatcagcgactgggatcgaccgtgcatgcaagggctatgtgctgaaaatgtacgatctatacccttgaatagagaaatgtggggacaatgtgcgtcaatattacttattattactgcgtgattcaagggattatagatgagatgggaaccctactcggactattcatcgcaacgaactaggttgattgaattggtgaccggccagcatggcagtttactagggtgtaaccctccaaggcatttttagaattcgccatcactcttactcccttcggcttcttttgagagaaatagttgttaatacgtcacacaagctctcggcctcgacggaatggggtggctttctccaacctagaccctgaatatataacacactgtccctggccgtagtgaacacgaatggatcaatacagagaatataattggatactcgtctatctatgagtctgagccaagtcagttggatatgtagatcaattgggtcagccagccaccacgattgctttccaaatgtggttagtctatagatggtcttgctatctggtttcgatcctagaaatgttagaagtgtaggagtcggcaattccttatctaagaaagaaaatagaagatagtacgacataaatagcaaagatccaggaacatcgataaagtattatagacactagacattgcccgaggaattagggcccaccgtggatctactctccgcgcgaacactccgattcaccaatcagataatctcatgcacagatcctagtcccaataaagcccttaaatgaaaccgaaagggggaaaaaaataacttcacttttctttaaaccccatccgccatggaccggtatcaatcaaacggacgactgctcgctttcttcgtcctccagggtctcattccctcggttgtcctaatcacaacacctaaacggtccgctatacgttatctgtctataccatgtatgatatggatcgtgttgcatgcgatgtacccaattcagggaagggggttcacatcgacccatctcctcgcaagttgtgcaacattcgtcttgacagcactagatcttctactgatcaacccacaagccgggcgcgacttcgtcgacgcaaatggaaacatcaagagctttatacctcgtctagtcgaggctgtccggttaatcacattcacgcgggctgttaatacaccccgacaagtgaagaacgtcccgcccttcccggcatactacaccaagagagatcccaaggtgatcccacgaggtcgcttcttggttagagaaactgctattgctgtctggcagtttctagttctagatatatgtactggtctgatcttgaaacaagccatgaatgaccaagacgaaggaaagacaagttcttccggtatcctgggactagagtggataacaaagactcttattcaagttgccattgcttggctcgttgtgtgtcgtatcctgatcagcttctactaccgcgtcgcttcgatcatctttgtcggcctgggggattctcctttgaacagtccgccgattattggcagaacggcggatgtatatacattgcggaatttctgggggtgagtcgctcttatgcttattcatttgattggatcaatttctcatgcttctcaaagaaaattctggcatcaaatgctacgactgcccctcacgtcgactagcaatttcctagcgcgggatgtgctccgtctgcccagatcgtcgcttgtggagcgatacaccaacgtgtttatcgtgttctttttctctggtttgatccacgtcgtactcgacagtctgcgggatgtttcaccgcgggatcctgcgactatgtcatttttcctctctttcgttatcggctatataattgaagacggtgtccaggctctctggaaacgaacacgcgggtcccgggacaatatcggcttgccgacgtggtggcagaagactattggctattgttgggtcctgacatggctgggggttacgtctccttggtatttcaggacgaagatgttaaagccggaacagcatatggtttgggttcctttcagcgttgctgggctcattagtcctcttttattgaatagtatagtcattggcggtggtcttgtgttgaagttcgtatttgagggagagatttgaaaggagagagtgtggaatatactggatttcgaagtttctccagctagatctccccggggaatagcgaagcacgacaatgttgtacgtagagaatatatgacaaaaaaacccatcgtacgctgatcaagagatcaactgatactaacgtccgatctttgagactagtacctctaggcaataataataccctgcctagaatatctacgaaggaaatgaattagatcaaagaaagcaaactgttctgactgcgaaacgtaggtggggctctgttgagcttctgctctacataaatgatgcaacatcccctaggcatgagaataataacctcaacacacgtgcggaaaacattagcctcaactgtcattgcgaagcagaaaaaagaaaacacctcagaaacaagaatcaagtccagggtggcatagcttgtccggcagcgtacttttggctcgcttgttgaatcatccgggcaatcatctgatcagcgggatctgttcgtccatagatttgaaacgccacttgcagtttctccagccatgtatcctgggctagagccaaatcagcgatttcgtagttgtattctgactggcaccagaacaccggtgtcaccgctccttgctcgactaccttgacggcccaatcatctaacaatccttcctcttcgagaaagacaaccatcaggaggtgaaggaccattcgagacataagcggtatgttgccggtttccgcagcagctttgagcttggggtcgacaatcagcgttgactgtgagctttgtctttggccgtccaggtccactgctcacgtaatgtagagtattccgcgaatcaatcgtcgtcgcaggtcgctgagtccttggaacggagttccaggcagacacgctttgcaggagcacacaaaccccagggattcatgacgctcatgtctggtttgagctttgagatctgggaagtaacagaagtaaatttcctcgccagcctcgatttttttggtggcaagaagttcgataaacggccttgggtcacttggaaccctcgcgttgggtatacacgaatgattgaaccgcgagccaagggtataaaaccctatagacttaagggcactggtaaaatagttttctgacaaagtctcaagcaaacctttaggttcctccgactcattgttttgaattagtagagattgtaccagctccgtgggcgagagttccataacggccctaaaaacatccaatcctgtgatatcaacagaggacttctgaatcacgaaaagggccttttcttttaagatcagggatcctcgttcaatgcgttttgtggcgaaagcaccccatcctttgcctggagagggcttcagctcgaatggtgcatcgtcagggtttgagcctgcgataagctaaagcggatagcaagttagaaacactctctagcaaatgaacagggcaacgtacgacgatttgcagacatggtgttgtgtggtccggtacgctgatggtgatggaggaaaggaaaggaatgagtgtgggattgcagacctggataggccctactacctaggtcgagcatataagtctgtttgctttcaacaaatgctctttgtttgtcaaacatcctagaaccaactaacgaggagaaattaacaatggttatttttgattacgatacttgaaacgaaagctgtttattgtcatgcaagtactatgtaggtgaaaataagggcctttactttctgaccatgaactgaatcatatctagctcgaagactaaggtcctggtcgaagaccggtagaaataactgctccatattcatataaatacctcaaccaacagataaacgatcaacgcccaaaccgctgcgtgatagcatcaccaggaggcaactccgaggagaaagtcggagtccgagaaattcgtggaagtcgagtccgatgttggggagcgggatctcgacctttgcctagtcagaagcacattagccggcatgtcttggagaccttggttcaacacatactatttcgcccatcccagtctggccgagcagggggaggcattggggctccgcgaggtgtcctcttccttgctcttttggaactaccagtgccgctccgttgattccgataaagctgctcgactccatctgggttgacgggaaatgtgggagtcttgggatgtcgtataatcgggacagaaggcaacgttgaggtattggacagaggaatggaggcagaggcacgttcaagagcagaatcagggacaggagcattgagcgatgagagagcttgggagactgtgtccgaggctgcggtttgcatccgggaccgcatggcacgagctttgaggaggttgtagagattggtcatttgagcgagtttattgttcttgtcgcggtacatatcattcaattcctgatttttcttttggaggtcttcttgggatgattgcatgtctgtagtacagatgttagtcagagctccagttaagagtggactcaattggaccgaccagataacttgttctgcagtgacatgatctctgtgttggcattgtgaatgaccttgtccatctgcgtgttcaggttggtgtacttctccgtcagcgtcttcgctcggtattcctggtagaagctgctcgagtcagccttagacaattccacggtacagttttataccgaggaagtgagacatacatctcctgtgtgctttggtatgcccaaaatgcaagtgcgcgaccagcacattccatgattgtgttcggatctaacccactcaacacgcttgttttgtagtcctccgtcggattcaagattgtcgaaacagcgtcatccggattaagaagtgccgtttgacacgcaggacagagccgattgctagtggttggacgagagagtccgaggctctctgcgcatccatgacagaatatgtgtctgaaatcgtcagtcttccgcctaagctgatccacgagagagttacttacgagcaggttgtcaccactgctttctctttcaattctgctcggcatttgagggaattgcatcttaaagaaaagtccatggtgtcgttgcagatgggatgcggttggagagcataaccctggaagaagtgaaggtcacgagttagcattggtagatgttagtttagtcaaccccaaaggaaatcttcaatagaacaacaacttggacagagaacatttggtatttgtctattaaaatgattattttcataaatttccgcgggctagaaaaagaatgtatttccctgagcatcgcgccgtgttgaagtcatcttctcttcaaactctttcccgggctcatactcatgccacagactagctgggtagatatgcttgtttttctcataccaccgtcgatctacgaccttggtttctgagaaatccttgtctgcaccctctagttgatcgtcactaggtcgagacagcggatcgtccgtagaattggtggaatcggtaatggggggtttgttggaataatcaaatagcaaaccaccagctcgagagagactgggcactcgattggcgatgaagtagtaaaactcgtaatgctgtgggaacattagactagatacttaaccaccgagaatcctgacgggtgaacttacatgtggaacgataatatcgcccttgacaagcatcaagtcgtcgacgctgactcgtgcccactctcggcgattgtctttcttcgccttggatgcaccgctggcaccacgtacgcccatctcagcaccgactttccggcaccgatccaagaacaaccaaacatggtcacccttcttaactttgacagctccagctggtatactcgttccatcgtagaagacaaatggaataagaatatcagtattcttaacagcctcttgcatgatcaagaactccttacggagagtatcgcgagcgagcgcttcagcttccaaggcagcctttgtcaaagctttgggtggagggggtgcattcgggtttgctttcatgcgtcgagtactgttctcggcgggtgttttcgaacctgaccgcgatacgcttgagtcgcgtggagttgtcgcggattcttccccggtctcatcctggtcatcaccgaatgatagtttgctttttgcgaaagccttctttttcttctttttcgggggaccgtcactgcgagaaggcgttgacctattgcgctgcgatcagctcaaagaaatgggaatgacaatcgaggctcttggcttacccgtcagttatatcgcctgcagagggagttgcgcttcttgaattaccagatgccagcagccccaaagacttgtcatgcgcctcgcgctctttcgcctctagaacatccgcgcgccgcttgcgaaattcggagagatgaacaagaccgacggtttgttccttgagcatctcctccgccgagacggtttggcctgcgaaggaccgtggagtggatgtgctactctcatcttcttctgccattttggattgcgaagataacaagctcaggtttggctactgagatgagctggtttgtgacgtctggtgctggcacgtgatcttgaatttctgtatattctacaaaatcactatattataagaagtattcacgctttcaaaacagaagaatatcaaatccttcatctgtaagctactttgcattcactgaatcttagaatccagaacattcaagcgtgtcatggtccctgtttactccctttcacatatttcacctctcacaccgctgcaaacaagacaaactcggttccatgcgcgcaaccttcgatctcgatcctctttgatacaactttctgcagcatttacccgtcaaattgaaattcagaaattatggacgaagaagaagacgacttctatgatccggtcgacgcggtgccgacaacgcaatcgctgaaccatacacaaaatgcagcttcaggccaaccgcagagcaattacatggaagaagacgatgaggtagaagaagaagatgatgatgtacgcgcttagcccacacctaccttcaatttttccttgctaattctatctgcaggatgactttaatattatcacagaggcacccgaaggcgcaccagctcccgaagcgtgagttcgctgtgattgcgcttcttgcactcactcttgctgatctttctagctctcacccgcgccatgcaagcttacgacaagaaccacaacggccgtcctctgcagactcgtcggggttagcgaggtctgcgacgccatccgcgattcctcgatacgaaacagcgactccgattcccggacacccagccggggccgcaagaccctcctcagaaaaaccaggctccgcctatccagccatccacagttccaccatcgacgtcaatgcgaatcccgtccaccctatgacagggaagcctatcatgtccacggacatggatgccgacttcccatccgacgacaagccctggcgccgacctggctcagacctctctgattacttcaactacggattcgacgagttcacatgggcagggtattgtctcaagcaacaaggtgtcagacaagaagtcagcagccagaagagacagatggacgatatgcaggccttcatgggtatgggaatgcccccgatgcctagtgcgccaggtcccgttgccccagtcagtgctgcgccgcccatggctggcatgcccggtattccggatatgaaccccgatatgatgcagggtatgctggccagcatgatgtctcagggcttggacccgtccaatatggatcctatggctttcatgcagcacgctcagtcgatgatgcccggtgggggtcagcagagtcaacctggctttgggggccagccccagggtcaagggtttaaccaaggggctcagggtcaaatgggctatggcggatacgaccaacgtggaggttacgggggccgaggacgtggccgaagatggtagtttgatattgaattcgtattactgttcaccctcggaataatgggatcacacggcgtttcatgcatacaaagggaatgacaatggtactggacaatttacgaattcgagcttcttcagaagtagaggtgtaggttgggaatggatgtacagcatacaatgtagctgaaggatggcttaggcatgtcaatgaaagaaccaataacacctaaacatcaagagataaatatttcaacagaacacaagtgattatatccagagacaaccaaagaggtccaaggaaaacagggctgttcggaaagaagctcatggttaagtcttggcattctggaaatttctccagtccagatcttcttcccccggaccaattccatcttcttcccttctccatcctcatcctcaacccatcctctcacgaatctccctcaccttaacaatggtacgttgaacatcccaattgatgccagaccccgatattccctatttccttaactcccggagcatgctagcacctcaactcccaacttttccttcctccaggccgagtccggctatccgaaaacccgcgcgcgatccccaattcagtccggatgtctcattgagaaacatattcactaactcgtccccttcacagtctgtcctccgcaacatcaagtccctcgctcccctcctggaccgcgtcctggtccagcgcatcaagcccgaggccaagactgcctccggtatcttcctccccgaggctgccgtgaaggagcagaacgaggctcaggtcctcgccgttggccccggtctcctcgaccgtgacggcaagcgtctccccatgggtgtcagcgccggtgacaaggtcctcattccccaggtatgtggtgcaacaattccttcgaaatacacggaacattatatactaacgtgtctgtgctcagttcggtggtaacgccatcaaggtcggcgaggaggagtacaccctcttccgggatcacgagtatgtttcctctctctccctctcactcccttttttttgccgagaacaacaactgacaacctcatctagtatcctggccaagatcaaggagtaaattagtctccaagacgatatttttatacgatattttgtttcgccgccattcatcctccttctgtcatgtcgacaccaatccccgtttcgctgtaaaatcgcgacggggatattggaagacccctgacgtgtatcatactgacgcgacgtcacgagctcgacctctctcaacgatctcaagaacaccgaccaaggaaaaaaaaacaaaaaataatagcgaatagggatgctctcattggctgatatttgacattcggttgtttaggtatcatgtccgttgtgggctcctattttggcctgtctttctattttgcatgcatgagtttttgaagcgctggattggccttgggtcttgcatgtctttgtccactgtacttttaaattaaactgcgacttgccttctcccagtggttatgctggggtgggtagtcggtaattgcagacttgatcatctcctctccattggcatattctccaattcttcgttgccattagaatgcgtctttctaaatatcttgaaagtcaatcaacgtgcagtaaaggtgatattttgataggctaaatatgataattaatactgattctcagcacgcaacaattcgtaactgcatctccccccatcttgctaataatgaaagcccatgttcccgggcaactaatcaatgctgatctgagtaccgtacatatcctcgccggtctcattctcggtgctcgagtgcgccattgattcaatcacctccgacaccctgtacatcagctccgcgccgatagtagacccgtattccctaatcctccgcgagcgttccatatttataaacacatcgaaagccattgaatctgcgctggcattgacaattgtctcatgagagggaaaggaaggtggatattggctgaaatcacgaacgcgaatgttatccaaaatgaagcgcgccgcgaaaggattaatccccaggtcgcggagagcgacttcatagtcggactcctcgtctgtgatattttccatcatctcagcgggaaacaaatcgtatcgaagtctccccattccgaaacaccacaatacaatgtataacgagtggttcgggatcggtatcagtaacgttgtggatagttcctcgtagctgtcacaaaattcagcgagcgactggctttctcttctcagagaagcattcgcaactctgctgacgtctgccctgtcaggtttgcagatgaggataactagaagcatatatcgatgcatgaggcggaaaatcttttccctgaacggggaattaattcccgcgattccattgaaccttgtatcccttggtccatgccctggaagataccgctgggtcagttcatgcggggttgtcagaataagtccagtatcaggtgccagaaggatctctgcatcacactggtatcgggaatcagcgttctcatagtttctgtagatcaacttgggtggattagttggccacccctccatatctcgcacgactaacgggtgagtggttaggagggtggtagacaagaagaacctcgggggcgggtagaatgccgatctggtcacgatctcctgcatggcgaaggcagggctcggcgagcgagacagacccgagggtctatcattagggtctgggggactgtcacccatctgtgaagggtcgtttgagaactcgccttctccaattcttgtggaccctgacagggaaagggacgacggatcattcgacgaggtgatatatcctccatcactgcctctggttcgcataaataaggatagcgacccgaggtcaccagacactgctttgagtggtttcggtgtctttttagaatctacagaagaaataggaagtggaggcttgaaagggtcttgtctcaatcctgtggagggtgacttgtagcccaatttcatacgaaacagttccatctgagcgaggcaagactctctcttgtccatgtctgaggaaatatgtgttgccgtagtactgaggttttgctcgtaaggaggtttgaaggaaacattgttatcgtttgcattctgcgaatctcgggctagctgggtgatgatttgatcgtttgctggccgggttactgaggaactcgaacagccccttgacacgattttgccttcatgaagcgtactgagagaagcagccacgactccctcctgttcacaaggtattcctggatccgccacaggttccaaaaaagccttcgttcctttcttgcccttcaaagctctcggtacttgcgctttctggctgtcaaccctgccaacggagaatcctttttctttggtcagattgggagaaacatcagtgaaagtgggttgcgatttgttgcatgaactgacatcgacgaatggaggtgaggacgcggcgttctcaaaatcaaatgcactgaattcgctttcagtgggatgcttgtcttggttagctaggcccagcaataatcaccagtcaagtactcacctcagagttcggtacactcagaccgtgagcctcgctatcgaagtcaaaggggtcggcctcattatgagtgtaccgatcataagccccgctgtcgtagtcaatagagtcggtctcaatactgacaaactgaggcaccatccctgatgaacccattaaggggggaaatgcgtccccatcacgatgagaagtcgcactagtgatattcgggcatgcggcaggaacatggcgaggaatagtaaaaccatcagctatgtttgactgaggcaagcccgaattgtagtaattaaagatatcccgcgtgttcacaggaactacaggaacatcaggaccactaggaacaaccagacgaaccggggcagaagacgaagaagatgtagccggactctgagcgaaagcagcgtgaaactcggacgaagcgatcattctctcatcctcagttgtgaggagaataggctcgtctttgatgtcagaggtcatcacttgaggaaggatgccgcgccagatgtttcccttgacggaatcgagttggagacatccgctcagcagctctagatcctcaggcttagtttcgagcctctccattaagaggtcagtgcagaagcgttcatcgatttctttgaggcgttcctctggattttcgagctcgagaccctcaataatgggaacataaattggcagctcacatgtctcgtctgcgtaatcaattggacaaagcttagtgtagtcctctgcgacgttgtagaatctggcgtattcaagaagagttggctggttggaagtcattttgtcgcacagaaaggagaggagaggagaggggaggggagagggaggagtgagaggtggtgacgagagaggattgtttacgggagaaagggaactgaagagttgggggagttgccctggtgagggagttgggtggtgaactgggaaggtacgggagacaacacacagtcccaactaggtaggcacgagactgagaccaaaaaccaagatacttgtctgaacaggcacatgtaatgattcaaaagagaagaaagataatatttcgcttatttcgctgattgtaatatgtcgctaagtgctatgagagaaagaacatatttcgattaccatgaaccctctgcggtccgcctagtcgttgtagttcgactggcgagacccgtccttgttgactgccggcagtccagacaaagcattggattcatcctcctgagactttccagtctcttcaagcacaggtttctcggcgtggaccgcaacacgcacagcatggcggcggtggggcgtgaagccataagaagcactgtggttggtagacctgttatcccaaagcgcgacatcgtcctggccccatgagaagcgggcatgcatctcctgcgtcgtggcgatcacatcggtgaggaagcggatgatagcgtcgctttctgcggtagggataccgacaatcttcttcacaaagccaggattgaagaatagtgagttccagccggtgactgggttcgtccgaatgagtgggtgttcggtggtgacgggttcccgacgcactggccggcctagggctcgggaatcgttggcctgcatgtcggcggagtggagagctgtgaggcctttgagatagttttgcatgtgcgaggagagcaagtcgtaggcggcgtactgcgaggaccagagggtgtcgccaccgcctcctcggggtgggccagagagaagcttgagagatgtgtaggacggtggttggatttcataggtcacgtctgagtgccataggaaactgggtgtgaagagggcacggttgtcgggggcgttgtcgccagcgtaaacgacatggacgtcctcgagacctgccttgcgaggaacagatgtggtggcgtgctatgtcttgttagtatatccactcatgaatgagctcaaagtcagatatcttaccttgtgcagcttgccccagtattcacccagttggcgttgagcttcgatatcgaagttcttctgggagcgaaaaaagacaacgcctcggtatgcaatcagccgggcgaggtcatcgcgctgtgcatcatcgagctttgagagatcaacaccatggatttcagttccaaccttagggttgtaatcaaagacagctgtggcatccctcagaaggttgcggaacttggcgtctcctcgcagtcccttgtcctcgtagggagtgtattcaagcggggcccagtggagatccgggaatgacggcaaaagatcttcgtgtgcatagttgtcgtgtcgggtgactggagtctggccgggctgatagccgaatttgttgtcaccagcgtcccgcgcaaggacaggaacggtgaacttggccacagttggggccacagttactacgggctcttccagtgatggggccatctttaacgcaatagacgatgtatggtatgtgaaattaaacgcggaagatggaaatgcggaggttgaaatgcgaaagatgaatgcggagtgataatggaagattattgagattattgatatcaaagaatggaactaagttcgaatagagagggcgaactggcttatatagaacatccaatgccaagtgagtcaaccccagataacgccattctggaacgacgacggatcttgcatggccccggagttcacggagatggcgcaatttctcaaatgaatcacctcaggcaaatacatgatggagtgcctgggtacgagataattggttcgtgatggatattgtattgcgatgagacccgctctctctcctctaagatattcaaggtaatcacgcaattttgctgacgttgaaggcgaaattggccatcttcctcaaatcaacatgggaaactgctgctcggtcgatatgtatcagctctcaccgctgtttcagaggcgagctccaaccaagtcaatatcccctgaacgcgtgttcaaaggattgaggtgttgatgtcccgtgcaggagagtggatgttgagattaggaatggcgctaaggagacgatcacgcaagagtggcgggtttttgcgacggttactcatcagcctcactggccccatgcctagttggtacaacaacatgcagctattgttagtatgctatagttcttgaatgcattggattggctaaagaattcgactttaattattaagattcaagcccaggggtctagactgtgttgtattgtcttacgatatatggctacgtgtttccgaggtcgacaatgaggtctcagactaatgagagttcggacttgacagatcaactgtgtggatgtcatgtttcgcatgctgaagatcagctccataaaaatacagatcaaagtcgctaaattctcctatctatcccagatgaagccggccatcgccaagggactgctgtccaatcgacaaatcttggacttgctccgatacattgctcagacgagtggcaacacccatgatgccagcctcaacatctgcgagaacacccgagagttcactgagggtagaccggggtgtccctgcagatccctcacgcgacttggagctcacaaagtcgctgatttgacagttgagcgtagcttcaacaccatgaagatggtcctcgatctctttgaggttgccggtatatcttgtcagaacttctttcatctccttcgagcgatgagagaagtaatcgaccaggttgacggggattccattgacgtccgtagacgcgtcaccctcaacgccgtcgggaagagcaagtgtgtttttgcgactcgaccgcatagatcgctccggaatctgttgatcctgcacagaccaccacccaccgccagtcgactggtattgtagagggagcttcagcgtatcgatggctcggaaggcaacttgggcctcggccgcatcccgtgtaacaaggctgcgcagcgcatcaatgtcacccgcatcgttctcaagcgcatgttgcatggtctccaatttgccttgtacaaattcaacgtcgttaggaattgtagccccctgcttttcgatggtcgggagcagatctccgacctcatggcacatcttcatctggttcaggatgtgcttgtcgatagcctcgatttggctacggatctcgtccgcgcagctctcaaattttgtggttggcaggagattgctaacgtcgactttcacgcccgggattactgtgctagtagcggtgctctgttgtagtggtgtagtctgtgcgggtgctggctggccgaagagagagagggtaggtttttgaggttgttgttgttgttgttgttgggctgtgttctggccgccaccgctgggatttattagaatatagccatgacacgagacgaggaaatggtcgggcacttacaacatgcctcctgtacctcctcctgttaatccaccaccaagcagaccacctccgagtccagcgaaggctggctttgcttgagtctgggccgtagacgcaccgccgccgaaaagagagccacctaaaccaccacccgttgttccttgagtcgtgccggtgccagcgccagcagttgatccaaacaaattgcttgccccagaaggctgtgtagtggtatttgcgcctccaaaaaggctactgccggccgcaccgctctgctgttgacctccaaacatgttggatccagtcggttgtgctggtgtggttcctgtggccgtgccgaacaagcctcctgctggtttaggtgctgtcgagctcgcagtgttcccgaagagactgctggtattagttgcgccaggagtagctgttgatgtggccgtgttgccgccactgttgatgggaggttgcggttagccttttttttttttctgtctgggactagggtgaccccagtctgcgagctgggaacaacgagggattgggagaggaaacgattcgaatcaaagcaaggggtcaggcgatagagataggtctgataggtgtaatcggagacaaagatgaatgggagcactaacaacaaagaactggtggagtttgtattgagggaaagtccacctgtggcaggcgtcgctgccttgggagcaaacataattgctaatatgacaataggtctcgaattctgaaatgagaatggaacctgtcaataggtccctcaataggaacagaccttggaagctgcgcaaatgcgatttgcggaatgcgcgaagcttctcggtactttgtttatccgacccgacctttcccagcttggaaaggctactggtttttatacttcgtttgtatggctttgttcgatacttggaaaatgcatagtaaaattggcatctcattctaaacgacattgatatgtcattcatgtgaccgccgtggacttttgatacaatcaatccatgggtgtctgacttgacctgtccattctcctttcgattctggtcttattcagagctttgccattgaatgagtcactgatcaaatgagctgcatctaaagccttcagcgaaggcagccgtccagtttaagtgacagtatttgtcattatggctgacgcgaatgccaaagagtggacgccagtatgcgtggcatcaacaagacgagaaagtgagagagagttatcagatccgtcacaactctcttcaaattcatcatcaacagtccaaatcgagccagtggcgacctctggtggtgtattcatcgatcaagataccgaattcggctatttcaagagtgcagaatggtcagactctagtaccgtgacccaggatcaacctttactgaacttgtggtgtataggacgccagacggaactactctgctgacagattcagcgaatcattctatcagaacatggatcttgtgagttggcgcatcatccctatattgattatctcactcacacagccaggccgccggatctactggaggacaagcccatgcaccagttatccccatactcaactctactctcagcggaaccgacttatgctaccgcaatctatcccttctacaaccttcaagatccatccactactctattcctctcatctgttcgtgatcatccaattcggctatcatcagccctagctcccatatcagtggcgagctactatctggtaaatccaatgacagaagcattcataactccgcactcaatgatctacccatccctgctgggtgggacccacttcctcacaggctcagatagtctcgtttgtctctttgacgtgtcccgaacgggagcacatggccctgtgacctcaatgccaaccatccccagcaaacgaaagcagattgtcggtggcggtattggcatgaagggcattgtttccgccctggctctaaaccccagtggggacggtatccttgctgcgggtactttcaccagacacgttggattgtacagctcaagtggctcgggtgagctccttgggactttcagcgtggcaaaaaccaacgcaaaccgtgatattgggggtcgtggagttacacagcttgtatggagtccctgtggcagatatctgtatgtcgccgagcgtaagagtgatggcattctggtttatgatgttcgagttacggggcaactgcttggacacttgcgcgggcgcaaggctcttacaaatcaacgcatgaaaattgatgttgttccatctggtcctgatggctctcatgagatttgggctggtggtaccgatgggtttataagggtttggaggagtccagagcactgtgcaggtgggaaggatcccgattgggagttcaaggtgcatgatggtaagtccattgacaatccccaagatgctcattgctaatgtatgacagatgccgtgacgagtacaatgtttcaccctatgggaagtgttgttgcaacctgctctgggcagcaacgtcttgtttcagatgattcctctggcgaatatattccagcggagaatcccgataacagcctcaaggtctggtcaatgccatttctgttgtcagaacccgacacaaaccatgacttagaccccgcggtttgaactgcaaaaagagaaccggtcttactcttacatctccttgctatatgcattccatcggaatccgtacagagaagcatatctagaaaccaaaaagccattaattgaatcactgcgtgaatgtaaattattttctagatagacgctctaccgcgtccatgtaacctgtattgactatgtaccaaatccatgcaatatgtactatgtactgtctcagaaacctcaggtccagtcttcagggaatccgaatgccatacttggcatatgggaagtcttccagggtggaatagagctggccaaacccatcaccaatcttcccaggggttccagaaccctgcaaacgccaggcctggagctcctccacctctttctcggcatctgacttctcatcctccttgtgcgatccggtggctccagcgagaacctcttcctcccggcccttgaactctcctaggagacccgggtgggggcaccaaacaacctgcatgccggcacgacgaccagcctcaacgcccggaaccgcatcctcaaacacgagacactcctccggtttgatctcagtcttccccttgctgcgcagctcactgttgatggtctccagcgcaagcaagtagatatcaggaagcggcttgcctcgacccttgccgatgcgcggatcatcaccaagaaccttgttatgttcagggaagagcgagaacagctctgtcagatgatcggtctttaatttgtagttgaatctgtgcgacgatgttgctagcgcgatgtacacgggctcatcggttgactgcgtcgacacaagattggacaacagagtcggcacaccggggagcggctttgcgcgtgggaagtagtgttcctgaagggctgttcgctcctcgttcagctgctgctcgccgatggggagctgggcaaagtctttgaagatcttgccggcctagatatttcgtaagtataccatacatcacgatatatagtgtgggacgaacctccggctggggtcgaccctgcatctgcgccttgattgaccagggaagcaggggtctgccgtacttttggagaattgcattcgtgactatagtgtataaatcctcggagtcaatcaacaagccgtccatgtcgaagagacatgctcggatgcggggaaggctgtcaaccaagtcaatggatgtataagtgcgaacatgattaattcactcacgcattagtggaagccatggttgtaatggtctgtttaatggtgtcagagtgggatgttgaccacgtttcgataagacgcggggaacaaacgttatcagtatcagtcccgtgattgagcccttggcaacgtctgatattctcgcccgacgacgacctgctcacaaaatgagcagttcttctaatgcgcccgaacgggacgggaaaggtgctcccgatgacgctgatgacagtggtgacgaggatgtcttccacgatgcccactttcccgccgaggaagaagccgtgagtcgtaacggtgttcaagcttatgatcggagccgcatattgacttcaatctttcttgcgatagcaactcctgaaagaagcccacgaaatcaaatccgaggcaaaccagctttttatcgcgacaagctatgaccaagccatctcctgctacgatcgagctctcgcttcctgcccgaactaccttgactacgatgtcgccataatccacagtaatattgctgcttgccatctgaaattggaagattggaaggctgcagtagactccgcaaccatctccattgaacgtctgagtaagattatcccgccgaccccaccggacgagggcaacgagtcgaaggggaaacaaatcccagaatccgaaaagaagcacacagatgcagtagttgaactatccggagatgacgaagaagccgagttgaaggaactacaacgattgcaagagcaggatgagcagcggggcaaggtgatgcgacttcgagccaaggttctcatgagacgtgccaaggcaaagacccaaatcggcggctggggtagtctgcaaggtgccgcagaggactaccaggcagtttctgcaattgagaacctttcagcagatgataaaaggtttgtccaacgggcattgagggaactccccgagcgcatcaatcaggcgcgggagaaggagatgggcgacatgatgggcaagctgaaagatgtgagtacttcttcctggataagatatgtcaaaataatagagcagtactgatctcgggcagcttggcaatggcatcttaagcccattcggtctgtcaacagacaacttcaagttcgtccaggacccgaagactggcggctataacatgaacttccaatcctgatcagctttagtcaatcagagacaatggcatcatctatttgttgtactccgggcacaggagagccctggaattaatttgtttctcggcatcatatgcataactggcaggaagccatgacggcgttctgacttttgcatatcatttatcttatttcaacaatgcatatcttgtaattaaaaaagctacagtcccatgattgtggagcacaggaacatatcatgcccagctatccaccatagtctcctttgaagccactggcttggatacgaacagttcttgccgtcatacacaaaatatgctggtctcaaaagggtctgtatttattgaccagccgggactgaattctttcaccgaaaatatgacaaatttcctctcgtttgtatacattcaggaatcatgagacatgcctagcaaggtctttgaaaatataatcatagaagtgtggttgtctttgacctcaggcgagactaaaaatatatcttgtcaagccgcatgatgaaactcccaactcatttagtcttaaaaccccagctttcgcacctgaatatactaaacaacacaacctcataaatcaccaaccatggctctcaaagtcttcaccactgaatccattggtgcgcagagaaaccacattgccatctacatcgaaaccgatccaagcgaagacagaggctggctgcaccatgtcaccggaacaatcctgaacggcatggattacacacccaggccaacccctaacccggaggtgctaccagaacatgtgccagactcaaagaaggagattggaactatcgaggaggctgatctagagaggttccgggaggaatgctgtctagcagttcctcccccgcgggcccaggtgacgctcaagggaacgcgactgtatcccgacaccccgctctaccgctgtggagattggctgaaagatgtcgaggagatggctttcaggaaggggatccttaagtccctgtgatgggttagttattttgtttcatggccttctgagaaagagtatgatactaagacaacgagcagtctgcggttccatacacgccatatcagagttaggactcctatgttggtatctagatagtattgaaacgaattattcttgtctgcagttttctgtcttgtgcgaccgttgttcaagacattatatagatggggaaaatagtggatagctataactatagggaagatcggaataatctgattctttgagctacacaacttgtctaggagatgtttcttgtcagaaaacagcttcattctcttacagttctcctttcagctgtctctaatcttgtagcagaattgttgctcccgagacctcgacgtatgtctcaaaacaatgccttctcgcatatagaccggttgcttatcttgccacttccgagcactctatcccatcatcttgtctgagaaccatcatctctcaggctataagctatatcagtccaaaaagtcccaccaatcatctccccggcatacaacttctactttgaaaaagtccatccaacaagatcaaagacatccacaactgtccaccatgccattcaacgtctatatcacccgacaagatggacgctgggattgggtattctatattgagcttgatgcaatccccaaggaagtgatagtggagagtactgggtggacacactccttcaagagcgacgggaaagacgggaatcaatacacagctcgactcaatcgcacccccagggtcaactctgcaggaaacatgatcgcaactatcgaggaagcagacttgccgaaattccatgaattatgctttacagcgattcgtccactgccgcagaaaaagcatatgaaccgtctggtccttcgctgcatgatgccagggcgatggaagcaagagccaagggagtggtggctgttgattcgggacagcgcttttgcaaaggggatattcaagcctcttgacattgagatatcagccagtcctaactgcctgtgaggacgctggggtgtggatagacaatctcttcggttggatatggactagaagtcatcaactagcgcatcttcgtcagtacctcacaattacaaatatttcatcccttggtaaactccattgtaaccctcgaccttctcactcatctggtggaacacaaactgcgccagacgcgcagcaggatacagccgcaaccctgtgggattgaggacctgcatcaatgccccgacagccccttcgtatccactgtccataacgccggcatgtatagtcactccggacctaaataatgagctgcgcacgaaaatctggcccatcacatccaaaggaacggagacagtctcgttgaattccacaaggtaggaaccctgcgcgagatctaaatatggatttgtattttccttcgaggagggaaagggtatctcttcagtcgaggccggctgtcggagtttgttatccaagtcgattaccccgggtgaggtccatttgagaacgcgcttcagtgtgaggtctacaccgcagggttgggcctgtagtgtgggatatttgacattgcgaatgatggagcgggtaatgatagagtgcccaggaaggatcatgtttaaagtgtcagagtctggtctcggttggtcctctgtgatctttgcctctgtactcggtacatgttggagaagtctgccaatgttctggaacagggacaagacaaacagagcaaacaacaaaccaagcaaacagtcttatagccgtcctacgatgtacagcatacggtacaacatacgtcaactggttatttcgcaggtacatacatatgtacctccaggcctaggtactatctgatattatcgaaccgaggaagccaaagggccgacagagaccttggaaaccccgtgagtttaaatctcgtccaatcagagcacaatgcggggacataacaccgggccgacccagcgcgtatggagccctcaatgccgagttcaacttccgaaggtatttgtatacttctatttaacctatttggacggagtttctatctctttggaatcaacttcggtgcaatttatacaaaatgccatcaatttaccgttccccatacccagatctggatatcaaatcagttgatttggtctcctatctgttctccaatcctttcaacacgcccttggaccggcctatatacatcaatgctgtctcaggagagcaatatactctcggagatgtgatgcaacgtacacgctctctgtccaacgggcttcggcaaagtataggggtaaagcccaacgacgtcgtggcattattcagtcccaacaccatcgactaccctgtggtatgccatgcaattgtaggctccagggctatcgttgccccgaccagtgcggctttgacagcactagagcttaacgctcagctcaagaccagcggggccaggttcatcatcgtccattcgtctttgttggagactgctcaaaccgcagccaaggggacatctgtcgagaagattgtcttgatagatgaccaaacacgggccaatggccaacctacatgcaatcatctcgctagtacatttgcgcccggtgattttctcgctatcgatccagccgaggcagatcgccaacccacattcatctgcttttcatctggaacatcaggcgcagccaagggtgtcattacaacacaccagaacatcacctcgaacctccagcaatggcgctaccaaatgctagactccggtcttcccgcccagcgaccagcaagacaatccgccattgcattcctaccattcagccatatctacggcttgaatctgttcatgtgccagtgtttgatatggggcacaacagtggtcatcatgcccaagttcgacctcgatctatacctcagttgcatccagaagtaccgaccagacgagttgacagtagtgccacccattgccctgctgttggtcaaagacccaagggtctccaactacgatctaagcagcgtgcgcaagatcatgtctgccgccgcaccgcttacaatcgaattatcgtccgccctcgaagccaagttcgcggagatttccaagacagaggtattctgcacccagtcatggggtctgacagagacctcgccaatggcgacagccgtcccgaatgaccgcatggataagcgaaacacgggcgtgggctgtattgtgccgaacatgcagctccgctttgtggatcccgagacgatgaaagacgcagccgtcacatctgacgggtccacggcacccgcggagatctggtgccggggtccgaacgtggtgatgggctactacaacaacgacgaagcgacgaaagaagcattccacgtggacgagaatgggacgaggtggttccgcacgggtgatatcggcactatcgatcgagatggctatgtcagtatccaggatcgcatcaaggagatgatcaagtacaaggggctgcaggtcatccctagcgagttggagggaaagctggtcgatcaccctgacgtggaggatgcggccgtgactggaatatgggtggatgacagggccactgagctaccggtcggctttgtggttttgagtcgccatgttaaagacatggatcgggagactgtccttgatgggatacacgcgtggttgaatgagcgcattgccaaccataagcgtctccgtggggggatctatgtcttgtcgcaaattcccaagtcgcccagtggaaagattctgcggagacagttgagggattggctgaagatccaagggcctaaagctcgtctgtgattgaatacttgggacaagcatctatgccaatggcgtggtaaccgtatagatcgaagtagtaattccaaccgttcaattagaaactccggcttatttctgcgtattccaaatattgtgtcacttgacagacatacatgctacgtagatacatctatcataattaaaatccaattccaagcaaattgaatgtccaaaatatccaaaacgctaaaacgtcaaacttcgggagatttccagtctcggggcccgcgggttccgatcggaggtcatttacggacttcgacttttgagactcagacccttgttttaacttgtcattctgtcagatggaattgatcacattaaattaagctcattgcacattccacatagcttctcacattctttccttaccttggtttcggacaagggctagtcctttttcacctgcgaggtcggtacccgcattgtgattcctactctcaattacacatatacttgtcatggggttcttgacgtggcccttctcacatgagaaggaggaaaagagacccaagttcgtcgagctaaggtcgtcaaaatggtttattatgttcgtcgtggcctttgctaccgggacggacatcttcatgtacggtcttatcgtaccggtcacgccaacagcattgaaagacaaagtgggaatctcagaggatgatgtccaaagctggacatccattctccttgccctgtactcggctgctttgttagcctttgcccctgttgtcgggtacattgctgaccgagccgagtcccgtcgatggcctttgctgtttggtctcgttgcgttggccgctgcaacagccttactgtgtgtcggtaccaatatcgcgttgtggattgttggtcgcttgtttcaaggcgctgccgctgcggtggtatggacggccggcctggcactgatagtagacactatcggaaaagacgaccttggccaagccattggctatgtctccatggctatcagcatcggaacgctagctggacctcttctcggtggcgttgtctacgagaatggtggttattatgccgttttcggtcttgctttcggtttcatcgccctcgatatcatcttacgattgctgttgatcgagaaaagacatgctattaaatggcttgcgccggagatgacaccgctgtccgtgacggagaagaagtcaggggaagttttagaacatcccgtcttgccaaccaatggctctgaatcccgtgaatcacaaccgccttctcccccctcacggagcgcgttcggacgtgtcgctattttgttgagctcaccccgtctcgtcgtatccgtctggggatactttatcttgtcaatcgtcctgacctcattcgacagtgtccttccactcttcgtgcaagagacattcaagtggcagcaaagtggccagggactaatcttcatctcgctcatggtgccgcacgtcttagacccactgatggggtttgttattgacaagtaccccaaatcctgtcgctacctcgctgcaggcgcatttctcaccgtcgttcccgttctggtgcttctgcgttttgtcaaggacaactcgatgcagcacaagattctattgtgtgccctcctcgcttgtgttggggtatgctttgcggtggctatgccacctctcattgtggaggtgttcttcgctgtgaaggagaaggaagataaaactcctgatatcttcggtcgcggtggcgctatggctctggcttttgggctgtcgaatatggggttcgcgaccgggagtctgatcggcccattctttgcgggttatattcgccaggaagctggctggggtgcgatgggttgggcattggggttgatagtgggcgtatcatctctcccaatcctgttgttcgtgggtggctggatcttgaaaaagccgctcgagtcagacactgaaggccagttgatggacagcgcccctgtcccataagttggcacagccaaacaaatatatttaccctgtatatatacttaatagaagactccggcagtcgttatccgcctatcaccatcatagaccttccccagtcaaacgtatcgtatctcttgagtaaccagaaagacaggtagtttagaattgagcgagtacagcatatccgagggaagagcgccaatgtaatggagggttgcacaacaactataaactgtagccaacgtgcatctagaaatatatatcatgattgtactaggctacactatcattagactcacgtataggaaacgacgaagaattgtaggcctctcacatgggtttatgcaatatctcaggtacaatatgacatacagattagagtacctgtaccatgacgttgcttctcgtaagttgattaaacttccatcccccaactggctgcgattcacattgaccatttgtatgcaatcatcttccaaagttacggagattcctacatactctagtgtaatttcagcttcttggtgtttaaattattaccactaaatcaaaaggtgattactatagcggtgatatacttccacgtctatataaggttctgaggtacgggattatgcggctctgtttccagggttcacctgagcatatgacttccacgtacaacaagaaaacatacacactataaccagagccgtctcagagccgataatggatattgtcttcgagggctttgactatttgttcgtattcctcacaaggttcgaaccccttcaatgtgatcggtggtcggcgtttcggcgtccgtccaggtgagttcggggagcgagggaccccgacaccgactgattcaatttatgtatggtgttaaaattgtctggagacgagggaatcataggtttgtcgtgtcaaatagagtttgatctgcgaagtctgagcatcttgttgacatggaaattagaggtactagcgactgagctaggatataagactcggcgagcgtctgtacatcgtgtgttgtactgactacattcaccccttcgattgttccattctttacattctacatcgaagcaaggggatatatcaagcataaagttcgtgctgcaaccctttgccctacaaccaattgtaccaaacccctagaaaatgggaggaccctatatgcctcgaacggcctccatgggaggtcgaccaacaattcccctcgatgtcccaatatgcgccgtcttcctcgctcttttcatcatcggcgccgcctgccatatgaccctgttccgtcgcaacctcgcaagggaccacaaattcattccatcgggcgcaacattcggtttctgcatgtcgcgtattatcgcaaacatccttcgcatcgcctgggcctgtcacccgacgaacattagacttgcgattgcagcacagatcttcgttgctgccggcgtgttgctgcttttcatcttgaacttgctatacgcacagcgtatgttccgagccgtctacccagtcctcggatggtcccgaccagtatcttgggcgttcaaagcactgtatgctctcgtcgtagtaacgatcatcatggtcatcacttgtgttattcagagttcgtatactctcaactcgaacacccttcgtatcgatcgtgatatccagctctatggccagacatacttcgccatcatctcgttcctaccgcttccgcttgtcgcacttgtccttctgtctccgaatagaaagtatattgaacaggttggctatggtagctggatcgccaaagtcttcatcgtcggacttgtcggctcattgctctgccttggagcatcatttcgtgccgggacctcttggatgccacctcgtcctgtcacggacccagcctggtatcacagtagggcctgcttctatatctttaacttcactattgatattctagtcgtggccattttcttcgtcgttcgtgttgaccggcgattctgggttccaaatgggagctcggaagtgcgtcactacagacgtggtgagaataacgcgcaagtcgcacaagaggggactgctcttacggttcacgacaaacaggatatcgagacgcagagtaggtagcagcatatctcagggcctgacatgtgacatttgtgattaaggaaggtgcgatggagggtgtcgcactttaggaaggcaccgtttgtttggggtataaaagggcccctccccccatttctcttcttctcttcttcttctctcctccacatctctctagccaccatctcaccgtagcccccacgagacagcgtcggcagaggatgccgtagcacatgctgcttcatctaccacagggaccatgacattaccatatgcacgaggtccatgtaggtctgcatcaaacatcaaactgggctttctcgtggacgttcctgaagtcgtggctctcattaccacttgacgagtcccacggaatacattaggggtgtaaatcttcgtagccgagactcgaaggtagtcacggcaatgaccgacgcttccaaccttacggtttcttttttgtgtatctaacagaccgacgatgaaggttgtaccattctccattgtttccccatgccactaccccagttgcactacccgtcgtcgcgccgtcgctcagctcggcgttactgttcttcccaacaccgacgtcgcccagtctacgaattagatagactgtgacgccgaatagacagaatagcctattgtttacatgtattatctgatcaatgcttaatcgtcaggatgactgaccatgatgcatactgtcatgtgttcgtgagctgaaagagcagctttcggtgttgacatggcactcattcaaggcgcggaagatgcacacattcttctccagctattggccttagatcgtcagaactttgaactttccctcattatcctatatgactagtgctttgttaccttacccaagaaggtctacacacggccgtttgaggtcgccatggtttcaatgcgtttctgatactcgatgttctcggatgccactttttgttcatggcagaagaagctgggcccaagcagataacaagcaatgatgacaagccttgcactggcacagataaaacgtaatctccatgcagcttctaacacttgtaagtcatctactgccatccagagaggaatattgaattccagccttctatgcgtatctgagctcctaatctgttaccacctgggcagagaaaggtatttaataatctggaatagcctcccaaggttatttctatagtcttatgggcctgggtcttacaaatggtcttttattttcatgattggtatcaacaagtggccaggcatcaaaccatacagaattaaataggcgagagccatgttcgattgcaacctccattctccgccagtccaattgcctctcgcaggacaaagatgaagtctatcaaaggaaatagtcaggtgtgcgcctcgataccataggttctcccgctcgggggcaggggtcgaattgtaggctagataatgtcagtgggatatccaaatgagaaattgcaggagtgcgcacaatgtgtatttcaaatgctcgtcaatctccataatggcggcctggttgccgcagcggtaacagtaatttggtgctgtggtctggttagtgcttttggtccatcaagtcttgcgaataagaatatacctgagaaaatagtgacgacgttccgatcctgtgaccagttatatccttccatcaccaattgatgggcacgtgccacaagagtcaagccattgttgtggttgaatgcctcggaaatgtcctgtccgaatgtgtatccagcaccacggggagagattccccatccgcatcggtcatcaggatcactccagagcaaatcacacatgggaccctcgtggggaacttcttggatgcgatcaagcgaccggatgttgtcgagagtgtcaatggatggactcagtccaccgtgaagacagaaaatctggttttcgatgagagcagtaaggggaaggtagtcgaaaaggtcggtgaagtatttccacacgttggcattgccgtatttgcggagacattcgtcatagaatccgtagacctgtgtgatctgtcgggactcgtggtttccacgaagaatcgtaatacgctgcgggtaacggatcttcagggagaccaggagggtcactgtctcaactgagtagtaaccacggtcgacgtagtcacctatatcaagaaagattaaaaaacattaccccacaacgcgttgacccgaccgttatccactcacccatgaagaggtagtttgtatccggattaggaccgccaatgcggaaaagctccattaagtcatggaactgtccgtgtatgtcaccgcagactgtcactgggcatttctattcggatatatgtcagtgggctgggcgatcaggacaacctcccgaccgagaacaacataccactggctgcacattggattcctcctgcaatacctctcttgcctggacgacacatatgatcaacttgaattcatcattaccactctgtcaaaacaagggacccacccgatcgcacagccgccgcacgtcttcttctgctaattgcttgcaagtcatcaaactctcgatccagccgtccaaagtcggtatggacccagggtcgcttgttggcgacaagtggtgtggctcgggggaccgcgcagtatcgatttccatgttgttatccattgcgtcggtgtgctcaactggttgaaaaggaggggccagctggggaggggcggtctcgtgagaaaacaacgggattcgtgggtaggcgcaggtatcgtggggtctggaaaagatgtgggataattacgctccagatggaaattcaattaaaaggcaaattcccagtattgattcaagggataaggggatgggacttgggaacacgagaaagggagaagagatgagagttcgggaaggtcaagttgagtggtgaacagatgcgccacacttcagccacacaccgctttctccagcctacgtaattatcaactacaccgttgtacagaacgactagggggtttatatctttgttgatttgtgttagacatttaagaagacaatccaatgggtgtataagaagatgtcccacacaatccactcagaagctacggaggaaagacgtcgagtgggccatggagacatggctgtagcttcgtgttattcttgttaatgttgagatggatatatgccatttcggaacaaaggatcttctactttgttaaagtcatcactcactcgtcactttttagataatgtcaccaccaaatccaccaccaaacccaccaaacccaccaaatccacccccgcctcgtccattactaccgaacggtcctcgattacgaccaacaggtggttcaccaggtcctacgggatcatatcttgcacctggaggtacacgggggtcatatccatcattaccagctcctcccccgttgaagagagggtcatcaaaggtaggatgcatacccccgccacctggaccaaagccagggcccataggtccgcgcaaaggatcattaggaccaagtcctggtgggtagagatctcgttctccaatgttgtacgggcttctgccttcaagtcgtcctggatatcctcgtagaggcctattgatctcaagctcatcttcgaacccgggtggagcaaagtctggtgggttggagcggcgaggagctgccgccaagggatcatcaaatgggcgtgggcgagcaggctgtggcagggagccatctcgaagaatatccggttgtctttcttcttgtggtcttgctctggataactggcttggatcttcatacccctctttgtacaaaccgggcgcgagtttctggatgacgttgatcttgaataaaccgaccaggtcgcctagtcgagctggggagatgaaaacatctcgcagagacgcagtgagattgtctgaggaggatatagggagcgcagaggtggagatgtagtctttgatggggatgtcgaacgagctggtccggtcatcgcccaatgccaatgcgaagatcactgcgttatttcccagccgactcactttgagtaaatactgcattgaagactgcgcatgtgcgtaccgaaaggcaaatgtatcgttagtgttccattctgcggggagggaaggtgtatctgtagatgtttctagagaagttaataggagatcaccgatgcgatcggagacagacttgacatacctaaagtgtgctcttcaccaagaccgatcaatctgaaatcaactgctaccatgcatgcatggccgatcagagccacggcctcatatgatgttttgagactcggctgtctatcccccgcggactggatagctctcacggcaagatcgaggatattatcctgacgaagggcatcggctggagccatgtttgatagatattgtatattttagacgtccaatactagatggcaaagaacctggaataatgtaggagatggggcggctcgtgaatgcccaaagtgacctcacatggggctagctgccttgggggagctgtggcgtcggaacaaacatcccccgctccagctatcttccccgcttgcctgttctatttgtggccaagcggagagctgcatacgaaacatacaaccactgttattctctgaaggtaatgatttgattgatatttcccctctataacatcgacttcgggaaattcttcattgcctgccgcactcccaaatccgccaaaatctcctcagttccacccaagatggcatcaaacttgtatgtgcgatggaacatctcaatgaccttgcccattcctgactgagtgataccacgaccaccaaagatgtttgtagcgagactggcaatttcgcctgcggcttgggtacagtgtgatttgagcagtccgataggtccacccagattctttgcttgttcggcgtatgtcatgttgcacatttgataggcgatggattcaagccatgcctggttagattcggctagggagatcatgcgggcgagcctgtcgggagttagaagagggatattaagagcagattgtaagaaactcacttctgacgaataactggctgttcaatcaacttcttaccaaagacgatgcgttgattggaccatttcattgtttcttcgacaaccaccattgacatgcggaccacggcagctaccatcataaagcgctcgtggttgaagttgctcatgataacgaggaaacctttgtgctcctcacccaggaggttctgaaccggaaccttgacattctcatattgcacgaaagcagtaccagcggcagtcgaatatgaggtcttgatttgctttgtctccacaccttcgccgcgaggaatcaagagcacggagaatcccttctcggtacggcaggcagtgacaaagtagtcggcgaacataccgtttgtaatccatttcctagacattgtcagcgcaaatccaattaaacaacaaacgtgatccgactgactttgttccgttgacaatataatgtttcccatcaggagtcttctctgcagtcgtcttcagacccgccacgtcgctaccagcaaaggcctccgtgacagccaaacacatctttttctggccggacaagacctcgccattgatgcgctccttgagtacaggatcgtgcagccattgctggacagctgtcaaactaatagccatgcctgccatatttccatcctggaagcctctcgcattggcacggaccaactcctgtgttacaatcatatcgtggagataatcaaactcctttccatccacaactccaccgagcaaggtgcggccatgcagatgctttccagggcccagtcgcatagccagaaggttcgtctcggccatgcgattgatgagctcctggctgatgtaggtgccatcccgctccttctcttgcgcttctggcgttacatatttatctgtgaactcccggacggccttttgcaagcgtcggtggctttccttgtagtatggggacttgaactggggtcgcagccacaggggttctgcgtagggcacggggctcaaacctccagggacgggcacgatgacctcgggcttttcgccttcgatgacaccaatgcaaagctggtcacggtatttctccagcacctcctggcggtgcagattgtagaaatcggatgttgcgtcctggccagcaatctgagcaagtacaacagcaccaccgggatgggcgtcgacaaaatcggttagatcatagacttggtggtcgatgatacaccagagggaatcctcggtgttgtgcttcgcgacttccgcgcgcgtcagggtttctgatgacatgttttagtctggggatctggagaaaggggagaagaatggggggcaccagtagtaaatacccccagattatgagtcgccaatcatgcaactgcagtttcaatttgagccgaggcccgaaaatataatgtggaacctttggctgcaacctcaacaccgaccaacgaggacctcggaacaggactggcccaccatacaacgtataattgatgttttggccaatagcgggctgttaaattataatcgccaagagtgtctatatcgttttacgacccacccgtgatcggcacgtgtcagtttgagcttcaactagctctagagagaaggggcagtacagcatgagatttatattgtttcggatatggggttcaaaagagtagacttctttctatgtacttatgtagaggctatggtgacattggtctttgtttctaagatctatctcaaatcgacagtagtgtattcatgggcacatcttgacaaatggtatctttaaacgccgtcaatgatcccccttcgaacgattattcttgagatctttcatcgcctgctccattaaccacgcgcaaacaggctgcgcatcgcttccgacccgccaactgcctagcacaacgtcgtgctgttcaagcacttcgcttgcgcgagcccaacgacgtcgccaaagctcctcgcgcttatttggcaggggcgcaggcggcacacccgttccattcggccctggtctccctgattggttggatggagactttgcggatcctgagaagttgagtcggtcgcttgcatattggaacccttggtatgcagcctgggcggctgccgctgggtatgattgaatgccagtcgcaggagccgcaggacgagccggcgtacttagtgctgttgatgcaattgatggggttgatggggttgatgcacccggatctaaactggttgttgaagacccggtgttcgtgcgacgcggaggaggcggtggtggcttgacgcgtgcaggttgcgattgactctgggtacctacagaattatcatcaaggcttttgagtccggaagaaggaagttcattcgttgatgtcccagcgctactctcagagtttgaaggcgagggatccaggtcaatcaatgagcctgtctttggcactgcacgtctgggtggcgtagggggaactggtctgcgcttgggaacctcttgtgctggtgtcgacatcgtgtcattttctggcacatcggaaggtgtagcgacgttgcgcagagaggatggtctggaacccttcgccaaatcagctggtgtagaaaccatgcgcaatgcagacggtttgatcggtttcgctgggcgtggccgtgaagtggcggggcgggtaagnnnnnnnnnnnnnnnnnnnnnnnnnnnnnnnnnnnnnnnnnnnnnnnnnnnnnnnnnnnnnnnnnnnnnnnnnnnnnnnnnnnnnnnnnnnnnnnnnnnnnnnnnnnnnnnnnnnnnnnnnnnnnnnnnnnnnnnnnnnnnnnnnnnnnnnnnnnnnnnnnnnnnnnnnnnnnnnngggggggggggggggggggggggcgggcccccgccccggcggtggttgatcgtctatgatgagatctgtgagatcaatcaggtcctcaaggtcaagatcttttggatctgtatcatgatgggctacgggcactgcagggtcagccgtgccacctcgaggcgggagcgctggtctgttggaagcggcatccgagtggtccactacaggtggtgaactgcgactgcgcttagacgggtcaagatgggggacggatttgtcgaagaacttctgcgtttctggagtcgtaacatcacgaatgaagacacccaggatctggccaggatatgccaagacaatctccgtgtaaacctccagatcagcttcaccactgtcaccaacaagaatgaattttcgttctgggaagtcgcgcagaatttgttccaatgatccccgtttcctctccgctgtgggctcaaagattccttgaagcatacccgaatactgtttgagatggaaggagcccggaggcaatccgaccatcttgaagtaccgctccaggaggggatacaattgccagggagcattcgacacatagtgaatttgcacgccctcactggccagtttgcaataccagtcgctaactccgtcgattttaagttcattcaattcacggacgaaggtgttgcggaacatctctttcgctccactggaaatggccgagtgcttaacggtatcatcaatgtcactgatcaaactgattccaaccggatcaatgacatcaatcggtcttgcgacagacaggtcctcagatgccaacacacgaatatgagttggcgcaaagggcagtgtagcgcgaagagtaaaatggcctgattcatccgtcatgatatttcgagacttgctttcggtgtcgttgaagaagaacactgtcaccggcatgctcccaacgggattcgacaagaatggacgaagtctttccattagatgggcatttgctatagataattcatccttactcaatggtgcagtgggtcggcgtgtttgttccacattcgagcctttccaagccgggtctgcttctctctcggccttggcgactagcgattgaatctccttgtcgatgtattcgtcatctcccttcccagaaatcttgtcgttactttcattatttgcagttccagacggtgcagagatcccgctcagcttcctagccagggcaatcattaatcggtgctttcggctcatctgccctcgactaggagagtaaatccagccacgcacgtcaacggccacaactgcctcttcattctccgttggatcccaagtaggcgaggagagatcgtcgtcctcgtgggttgcaccccggtaatcatcgatagtttctgaccacgactcacgtcgcggacgtgtgttggtaccggtgctcgtgctcttcttcttctctggcaatcgcctagcataactggggaataccaccatctcctcatcgcctgaccgtgaaatctgtacgtccgggaatgcaccgggtgtatcgtagtagtcctcatcgtattcactcctctgcccggaccattgtgcggtataggtctggcgtagctcatttgccgctttgagatatccgtagaccttcttccgacggctaccgggggcaccagcaccatcaccaccccctggcgcccatgttgatgaaagtccagactgcgacatcgggtctatcgttgtgtccttcggtccgtagcggggttctcggatcgacttcgggtatcttgcagctaggctgctactagctactgtagtaggtttcgatagccttgactgtcgttgggtcccgagaagataattcacaagacgtgcgccaaatttgctatcgcgtgtggcgagtcgcgcttgtcgctgaaggatcgctcggtagattcgcgattgggcccggtgtcggagcgcgggcagggtttcgtaccggatgccccagagacgggattgagtgcgtctggttgcgcgtgcaccaattatcagatcaagtatatgcgaaagtctgctgggtctaggttcgcgggggaaggaacgaaagaggctggtaggtggacgtctaaagagagagggcctcgaccgcaagattggccaacggaaacgtgatttaggcgccagggtcccgggtggtatgatgtacaagcagggtaaagtattccgcgacacaaaaagccaagtcgagtaaggctgtagaaagttgattacctgcggggaagagatcggccatgacgatgactactcgggtgcgctcaccgcgttgcaaccgaagattccagtttgatatttgagactcttgttcttttgtgttgaaataactacatttagacataatcatctaatatttaagattctatccatacatccacaggtatttgaaaggaagcagatacgggaattttgcattgatgaaatgtatcctgatttataatctagccatgaaacctctcgctgtttcagatatagtgagaaaaatcgtatattgtacactaatatatgagaactacctaggtatcaagtgccagttatgcactgtcctcggcgtagttcaccttctttgcacgtgaacttcgagaaggtatcgaacgagcactgtccagttccaccgaaacctccccagtttcttcggactctggggtagactcagtcaacgaagctctgcgtttgcgagacctgctcggccgaggtgtgcgtttcgtctccctgaccggttttttgactggcgtttctatcttgacgggtatatctaggggagcatcgtctgtgacagactcattcttaccctttttggcggcgctttttttaggacttggtgcagccttaggcttcacgattttcttcgccggtcggagccattcttccatgccctcaggccaatagaccctgccatccggcccacccatcccgacttcttcgtctgggatggcgcgaggcggtggtattgagccttgtaggtccacgaatgccccgttcttcttggaatttttgggtggtttgaatggttggttttcgtcaaggcgtatgaagggtattatttcgttcacaagatcgtagccggggagtttgaagtttctcatcaactcaaatacggcttgttctttgtccttggcctcaatcatcaggtccatggtaggcgcacaaggaggtaaagtagtaacgcgggcactgtgtttgcgtcgttggcgccgagtgatggcgggtgaagtttgttcggaatagtgcatcttttgagtgatattcttccgagaccatgttgctgatatacgctcatagaggggtatgatatcctcggttccctctcggagctcattggcgtcaaaaatgatattatggtggtggtagtcgaggacaagagggatattgagctcctcgcaaataggcagtagatcgtgaacggaccagctcacgtcgtcattctccagaactaatcgattcttgatgtcttgcgacaacatagcgtagttctctcggaaccgatccagtgtagcagccttatcaccaaacactccacccatatgaaggatcatgactgcatcgcggtcctgctgtggaggaagtttgagtagccggagcatttccgagtgatactcgagatcgcgaacggaattctcgatgacttcttttctcggtgatccaaattgagtaaattggccagggtgaaccgaaacccggtgtccaagttctccaaccacacgtcctacttctgccagcacctccgaggcgaatggcgccagcttataaccatattccttatgactggcaaatgggaacatctcactgctgagtcgcatgaacttaatgccatacttgtcgttccaacggatgattttgaccaaatcgcgtgcattcgccaggcctagcccctcaacgaaagcttgtccgcgtgcaacatcggctggctgatcgcgatctgggcgatttttggtcgggtgtgtgggctggtcgggatcttggagcgggtgtcgattttcgattatagaggcgattcgacatgttcgagaacagaatacggacggtgttgaatagcgaaggtacgtatttagacaagcctgtgcaagtcagaacccataatcgtcagcgcgagtgtatcgtgcccagcacagcaaaactcacatatcctaatcgacctttccatggcaggggaaggtagctgctgttcaccggaggtggtcggccgagtgcctcttttagctcttccgcatcaacggggacatcttcgtctgattctgggtccaatgaagcctctacctgaccagcaggtaatggtatatctccattgaggatatccgcaggcttcatctccggcccaggcgtctcagttgccccgaccatatcttctggatccagatagcttggttgtcggccaagatcctgtgaatacgcacgcgatgatgcgagcctcgacgtgtttaagggatgcgcaacacttttaaatgagaaatacgagaagcgcagggcacagtgggctgcatgatgggcattatgaattggggcgagcgatctggttctcgccacaggaacagggattctcaatgacgtatgtcgaccctgttggctagcttccaagggatgaacacggatagacagaccctgcagcagccgaggaaaagaccgacacattcagcggacttttggaagtagctcaaggagtgttggggtttgaaggaggtcgtaagggcgggatgttccatgacgcgccaatccacgcgactcaccgcaccaattcacccaacctcatcaaccttgaaaccacaatttgacatgatcatatctgcaatttcgaggcctggaaattgtctgcaatctacgtgataatatacaatagtgcatgaacccattgatgcctcaggcctcatacgtcagcgcacctgtcaggcaaaagtacccgacgcacgaaccgcctcaactgcagaaagcgggacaactagccgaagaaacaatgcctagtggctgcacatgtgctctgctactatttatattggacacatcacaatgccattgtctgtgaaaccttgattgtataacagtccgttagcctgcaggggctatgtttgcagtacgttgtacagcaggcgcaaggattgctgcttttgatatatttccgccatactatatctacaatgtccttggtaaggagcccttccatacccgattgatttgtaggatgtcggcatctgttaactcggaccacccattaggatcctttcggtgctactaaatttaaagatacagatcatttcctcaaaaggatacacagacatggctgggccgtgttctgaaaattggcgtaggtctacatgtgggaaatattattcaactgatgtaggagagcagaggctagagacgaataggctcagacccttcgagcaaattagcctcagacaatgcgcggctcgaaccgaagttgatttcattcccaagcccaaagatgagaatgaagacaatttatgtcacggcatatgcttatcagccaacgtctatgggtacatacgtatgtaggatgatatgtacgtactttatgccggatgatcaaggtatgtgcatagacaatgaagttctatgttgggtttgccgcataactgttccggtgctagatccaatgagaccttatgggtaccaatcagcgtgaactctatgacaatagtctgcatatgtgggtatactaaatgagtacgggggagctgataggggaattctccgggatataacaacgcagcaagttgcacggtggtatgattggagctagggccaagacgaggtggggttaagatgggtactgacagttatttcgaacttttgtacggactaactcgtattaacctttagttataatcgcctgttgttcgcaatcatgttctttccttaatcttccgaggccaaagctcttttttacctcacagaagaactattgccgcaatgattctcaaggttgttgaaccgaaaccggttcccccagagccaatcgctatatgtggaatgtctgtacgtctccctggaggcctacacacaccccaacagctatgggacttcctggttgccaaaggagatgcccgtggccaagtgccgaagtccagatataatgtctccacatactactccgagacccagaaaccgggcagcgtcaagaccgagtatggatacttcctggatgaaagcattgacattgcttctgtggatacatccttcttcacaatgggcaagttggaggtggagcgcatggatccacagcaacggcagatgctggaagttgccagggagtgtatggaagatgccggcgaaaccaactggaaaggacgaccgattgggtgctacatgggtagctttggtgaagactggcttgaaatctgtgtcaaagaaacccaacaatacggccagcatcgagtgagcggatatggagacttcatgctgcctaaccgagtctcatatgagatggacctgacggggccgaggttagttgttccatatttttttttatcttggaatagaatgcaattgctaagtggaaaaaaataataaagcatggtcgtacgtactggctgctcagcaggtattgttgcactgcatgaagcatgtctggcaatttccaggggcgattgcgagagcgctatagttggcggtgcgaatttgataatggcaccaggcatgacagctgccatgagtgagcaaggcgtaatttcaccggatgggtcttgcaagagcttctctgccgatgccaatggttatgcgcgaggagagggaatctctgctatcttcatcaagcccctggctgatgccctccgggatggaaatccagttcgagcggttatccgttcgacatcatccaacagtgacggaaggggtgctggaatcggcgcacatgttcccaacgatgtttcgcacgaggccatgatcaggcgtgcatatgaggtggcaggtattacagattactcccagaccgcatttttcgagtgtcatggtactggcacccaagttggagatcccatcgaaacccgagcagtgggtcgggtttttggtccttctggtggtatcctcattgggtctgtcaaacccaatcttggtcacgctgaaggagcttcgggaattacatccctgatcaagtcggtactagccctggaaaatcggaccattcctccaaatatcaagtttaaggagcgcaaccccaacatccagtgggatgaatatgggctcgctgttcccacagacccgatgccatggcctgaggccaggagcgagcgaattagtgtgaactcttttggaattggaggtaccaacgctcacgttattgtcgattcagctcggagctttggtgtctcccccgttgccacacggcataccatttcgccccagctgcttgtttattccgcaaacaatgccgagtcactaaaacaaatgatttcccactacacatcctatgttcagaagaacccagccagagttgccgatctggcgttcactctagctaataaaagggagcatctgcctcatcgggcattctctgtgcaaagcccattgggtccgctcacgacttcggcaccctcgaaaactggggagacaccaaatatcgtcatggttttcacgggccagggcgctcagtggccacaaatgggtgcctctatgatccacaacgacgtctatcccgcatttaagaagagcattcaaaatcttgactcacatttgcaaaccctcacagatgctccagactggagcattgaagaagagctcttgaaggaccccgataccagcagactcagctcgtctgaattatcccagcctctctgtacagcaatccaggtggctctgatcgatacttttgcttccgttggagttcaacctgctgctgtcgtgggtcattccagcggcgaaatagctgctgcatacgctgccggtgctatcacagccaccgaagcaatcacgattgcattctatcgaggtcaggtcaccaaggcgcaaaccaggcctgggtccatggcagctataggcatgggagctgaggacatccaggaatatctacaggacggtgtcgttgttgcttgcgaaaactcacctaagagtgttaccctcgctggtgatacacatgctattgaaaaggtagttgccatcattaaggaggcccatcctgatgtcctggctagacagttgaaagtcgacaaggcgtaccactctcatcatatggctgagataggtgacgagtaccatgctttgattgaacatgaaatatccaccaaggctccaaataagttattcttcagcagtgtcgagaacgaactactcacggaagcccaacatctcggccctaaatactggcagatgaaccttcagtctccggtcctcttccgctcggctgtatcgtctataattaagcaccagatttcgaagaatatggtgctgcttgaagttggaccgcactccgctcttgcgggccccttgcgacagatccagagtcatctttccacttcttctccttatatttctacgtttgttcgcaaccaggatagtacggaatctttcctgactgccattggccaactgcatgttctcaatgctgtcccagcgttggataaggtcatcagcacgggctctactctcccagatcttccaagatacccatgggatcactcaaagaaattctggtatgagtctcggttgagcaaggagtggaggcatcgcgagcacaaatatcacgatcttttgggtgtccgggtaacagagagtcctgacttccatcctctgttccgaaatctctttcacttggacaacgccccgtggattcgcgaccacaaggttggtgatgatattgtattccccttcgctggctatgctgcgatgattggcgaggctgtgagacaggttaccggagttcgcgaggcattcaaactgcgcaacgtcattgtcagcactgcccttgtcttgaatgagggcccaccagttgagatcatgacaacattacatcgccatagattgactgattccctggacagtgagtggtgggaatttgccatcacttctcacaacggagcgaattggatcaagcattgctcaggcgaggtcagatcgcttaacgaataccttgaagatgtagacaagaaagcccctcttgtgcgcaaggttgaaacacgccgttgctatcattctatggccatgtctggtctgaattttgggccatcatttcaacgtcttgaccatgtccgctcagacactgtttcgcagagcgcgacgtctgaacttgttgcgaaagatactgatggggataactatcatttgcaccccacagtcatcgatgcctcacttcagctgctcagtgtcgctgcttccaaaggatatgccgaaccgataaccaacataatggttcctactcacattcaagagatctccatctaccgctgttatgagaatgtccacgtccaagcttccgcatcttacaccccgaacggctctatcattgggagtggccagtgtattactgcaggggggaaagttgctttacgcagttctggaattaaactctctgttctcgatcatcaggaccctgaaaagggggaaccccccattggctgtgcagaatgggctccccatatcgacttcctggatgtcaacactctcatcaagccattgattgaccgcagtgattacatgcccgctttgacagagctatctcatctgtgtatgatttacacacagcgtgtgattgcggatctggatactccaatcagccacatgtacaagtatcgatcatggattgatcaacacctgttgtctgtggatctgcaaagtctccaaatccttgacaatattgccattaaacagcgagtgaaagaactcgttgaccaaatttcccaaactaatggcgcccatcttgctgttggtattgaagtgattttcaataacgtccaacagattttcaccggggaggctgaggctctggatctccttctgaccgatgacatattggccaacgtctacaacgctatggatcagtgtgatatttccgaattcatcaggaacttaactcacactaagcctaatctgcgtatcctcgaaataggtgccggaaccggtgggtctacagctaatatcctgaagctgttgacccctgggagtaggaccctatacatgaactacaccttcacggatatctcatctggcttctttgttgctgcaaaggatcgatttgccagttacccaaacatcgaatacgctactctcgacattagtaaggatccctccgatcaggggttcgatgatcgcaaatacgacctaattctggcgaccaatgtcatccacgccacagcatccttgaacgacagtttaagcaacattcataaacttctttctccgaccggatggctcctgctccacgaattgacacccatatccaaatggatcaactatatctttggaaccctggccggttggtggtacggcgaggttgatggccggtcgggcgagccgtacataggcattgaacgctgggcaaaggaactcaaggccgctggatttcgcactcctgatgctgcagttctggattcgaaccaaccacatcagttgaacgccatgatcgtggcgagaccggaggttgacatcgcacctaagaaatgcgtcactgtcttgaccctctctaaatcaatgtccgtaggtcctttgcttcaggctctggataacaggggatactccgttcatcattctcggtttgacgaagagcccctgcctgaaggacaagatgtgattgccttgcttgatgaagaagccccattcttcgaaggcatggataaccaacgctttgactctttcaagaaattggcacacagcctagatcaacgtggtgttctgtgggtgactcgttcatcacaagcccaatgtcgggacccgagatttgcccagatcaacggcgtagcgaggacgattcgcaatgaattgcgtgtcgactttgctacttgcgaggttgacgatcttgatgtctcttttgagaaactcatcgacgtatatgagaagttccaagtccgccaggaggatgagaccctcaagcctgaatttgaatacgctatcgtggacaatacggtacaagttgggcggtatcatcctttctcggcgcaaaatggacaagaggcgctggcttcaaatagtagcatcgcccttcgaacaagtaaaccaggccgcttggcttcgttacactgggctcatggggatatcaaacctctggagggagatgaggtggaaatcgacacttacgcaatcggtttgaatttcaaggtaagttcgaaggtaacaagtggacctaataacacatactgatatgaaacaggatgtcttatgtgccatgggtattgtcgaagccaaagaaaatgaatttggccatgaaggcgcgggcatagtccgccgcactggccccgatgttcaaagtctgaaagtcggtgatcgtgtcatggtcgtcgggagctgtttatttgggacgcaattagttctctccgagaacctgtgcgagaagattccaggcggcttaagcttcagtgatgcggccagcatgccttgcgtgttcagtacatcgatatactccatctttgacgttggaaatctgaaaaaaggacaggtttgttccccctcaaccttttgacgttttaggtcatcttttgacatattttatagtccattcttatccatagtgcctgtggtggagttggcattgcgaccattcagcttgctcaaatggttggtgccgagatttacgcaactgtcggtaacgaggagaaggtcaggtatctcatggacacgtttggccttcctcggaacaggatcctaaactcccgtaatgcctcgtttgttgaggatatcatgcgggagacaaatggacagggtgtcgacttggcattgaactcattgtctggtgaactattgcatgctacgtggaaatgcattgcaccttttgggaagatggtcgagattggcaagcgagacttgattggctctggaaaacttgatatgactcctttcttggacaaccggagctattgctgtgtcgacttggatcaaatttgttccagaaagccgatccttgcaaagaagtatgtatcgaaggggatgacaatgtatgagactcgacaactgacatattatgcaggctgctgaaggaaattgtggacctactcaaggagcgctacatctctcctatccgacctatcaaagtctttagttctgatggaatacacgacgctttccgttacatgcagcaaggcactcatctaggaaagatcgttgtctcgatgcgtgatacttcaggccaggtcagcgctgtacaaaacatccagccacgaaaaaagcccacccaactcaacagctccggtgcatacctgctcgtaggtggcctcggaggcctgggtcgggctatatctacgtggatggttcaacgtggagctcgccacctcatatatctttcccgaactgcgggttcgagcgaaagccaccgcgagtttgcccaagagcttgccagtatggattgtcgtgtggactttgttcaaggtagcgtgtccaatatcgcggatgtgaccaccgctgtcacacgggctcaaggccgacttcggggcatcttgcagatgtccatgatgcttcgtgatcggagctttgaacgcatgacactagaagagtggaacacatctgttgatccgaaggtcaagggaacgtggaaccttcacaatgcttctgtatctgccaatgcggaacttgacttctttgttcttttcagttcggtgtctggtgtctttggactccctggtcagatcaactatgctggtgccaacacgttcctggatgcattttctcaataccgattggggttgggactacctgcttgcgcgatcgatatcggtattgtcgaaggagtcggttatgctgccgagcaggatgaaatcttacaaaagctcaaagccgctggtggtctaggcaatacggtctcagtgagcgagcttctgagcgcggtagaggcagcgatgacatctatctcaagtaatttgagaccccaagcaggcaacttcggcgttggaattcggcccaacgtgcctctggccgatcaaagaaaccgtttggtctggaagaaggacatacgaatgtcggtgttccataatactggagcagctggtaccatcttgacttctgcttctgacgctggtgctggcttggaggcttttattacacaggccaagggcgacgctgcgctaataaatcaacctggatctgctcaaatgctcgccgtggaaattggaaagaaggtgtttagcttcttgctgaagcctgaagaagatctggtgacatcttgctccttgtctgatcttggaatggactctctcgtggcaattgaggtgaaacagtggtggaaggcgacatttgggttcgatatcagtgtcctggaattgatgggaatgggctctctcgatatactcggagagcacgctgctcatggcatgcttagattgttccatggtgtacaagatcaagctgattgagcgagatgtggttatgtttcactttttgatgtattaaaaggaacaaatcgggaaatagaatcggcgagatatgatagccaggtctcgccacattccacttctttttctccattaaaacctaagaattatgtggcttaaaagtgacagcagagtaatatgagctatactgcacccaccgtttctaattattcatgttctgctcagacttgatgtgatacctcaggctgaggaagtcggaatatcgtcgcccagattcccaatgccacagccagcatggcgagcaagattggctgcagcaccgtgacccctttagcctgagcaatggcaccaaccataaatgggaaaacagcaccaccacccatagaaagggcagctgcaaagccaatagcggcaacgtgaagatttttgggtagcaatcgtgtcgccacaaccacaactcccgggaagatagtccccataaagaatccaacaaaggcaaccgcaaccgcggacacgatgaactcaggcacgagccagaagatgagctcaagggcaattgcgagcgagatgtagacaacaatggacaacttctctccaattcgtggcgacacaaaccctagcacgaatcgaccgactgtgatgccgagccagaagcctgtctctgccattccggattcgaatgggttgccgtgtcggactttcgtcataaacacgacgatccatccaccgattgctacctcaattccgccatagaggaaaaggaagacggcgcatatccaagtgaccttatatgtaagggcaagacgtgtttgggagaatgctcctcctctgcctgggatactggggttctctttttgatatttactactagtctcatcccagaaagcgctggcggagtaaatcagcgagatcacagctgctccggtctatatttcatcgttagtttgtcgatatccagtggctgtagagaggatcgagataccatcaaatagtaatgagagtaccattcccatccagctttggtgattagactcgtagcaatgagagggcttattgtggcccccacgccgaagaatccatggaagaaaccgagcacttcatgcgagttcgccatgtttccgatccatacattccatgccgcgttgtgaaatccgctccccaatccaaccaggacgtacataatcaccaagactggaaagggcgggtggatagatatgactgcaaaggcaagcatatggcaaatcggggcaatgattgtgatccctcgtctgccgaaagtctgatgaactgaattgctcaggatggcggatatggcatatcccacaaagggcgaaaggaacactagagaaatgaccgtgtagctcttttgatagtaaatctctagctgaaaagttcaataagatggtcagcgatcctatacagatcaagtaaagctgagttggtgacacaaacatagggaataattgctccatatgcagcatcattggaccccatcacaaatgcacacaaacacgtggcagtcaccttccatatggttgtttttgactcgttccatcttggtgcgacgttcactgcatgcaaaggtgggctttcatcggtctctgaaggcgtagcttcgggcgtatattgaccaaattcgcccggtgtcggtggccaggatggccgtgaggtcgatcccgcgcttctggtcatttcgaatcgtgtcactcccaaggttgaagagttgaagataagagtaagaattgtgagattgagggggagcggggaaaacaagcaaatgtaaccctgatatcccatgtcctatatgtgtagctttatagatctatctctggaacatgatgcataatatctagttccagttccattgcttctatttaacgtcagttaaatctacattcgcatttgaatcaaaaccaatgatcctagtaagttgcctagcgttccgaagccaacatacagccctagaggccaaataaggatatgaaaagccctcgagggtgcccagatagaacaaagtatcttatagacccctgtcaatcttcaaatcgtgcacatcatcaagtaatgtgggcaatatagtaaatgccggtcacgtggtggtattcagcagcgcgtgtttacccgacatcggaatatctttggaagctaatcggagtcaggtgatctgataagccgataccaaaatagcactgaaataactattatgctcagtaatcaggtcggatgactaattatgccactgttctaaggttgaccaaaggagatacatagtgttcaaaaagtctgttcccactgccccacttgctatccccctaacaaccatcgtggttttttttcttcttcctacacaccccccaatgacattatagtgttcaaaaagtctgttcccactgccccacttgctatccccctaacaaccatcgtggttttttttcttcttcctacacaccccccaatggcattaaccaaggatatccttggtttaggtcgtacaaaatcaggtgagctatctgttactcagcgctcagctattatttatacccaccaggccggtgccacccagtcaaagctagcactcgattttaggtactcccgccgaacgatttacaatactttgaaacggttcaaagaacacaatactgttaaatctctcccttgaaccggtcgcccaaggatctttagtgatcgaactcgccatttactttttatactcgcccgccggcaccccttttggtcctataaaacgctgagttgtgctatacctggtcatccatcccgctctactattattaacgttttaaggctaaccggtcttctaaaatataggacaaaaaggaagattctaatcggaaaggaattagctcgacgacgatatcgttttattcaaaaatagcgctctgagtggtctagaaataacgtttaaaactaggtcttctcggatgagtattctgtacaacgaataacaaactgcagaccacaatggtgttggcgctttcggtcggagggctatagaaaagatcttataaatgctaaggtatacattaaagatatttcacaaatggtttagggtacaatctggttaagaagtcgattagagttgattattataaggcgggagaatattattaacccggaatcgaagaagacaggatatactactatttcctatatagatactctcgaagaaggtctacttccattctatcgaccctactctatcttttagtaagataacactcggatccatactactaaaatcacacaggaatggtttaaaactcacgggatatatatagaggagtagctgccgcactcactagatttaaacccgattgaacctatatagcggtggctaaaggttaaactttttgagttatttcctaagctaatatatataggaaggtctgaggaggattagatagtattcaaaaggtatataaagatagtataggatgctattccgcagtcgaagattgattcattgattttaagtatagggcgcagatatatggcagtacagaaggcaaaggggtattatacaaaatattaaatttaaattttacccgagattggcatagggttcaaccctatttaattcgaagtaaattgagtaaagtatggtggtgctatgcatagatatataaagatatatatttcaatgttcatgggtgaaaatgcgggtgggaacagacttattaaaccccactgtatgtaagccatccatggaaccggccatgatcactagggcggtgatgggagcggtgagccaaaaacacccattggtagtggcacaattcgtcgcccgtaacagatggcggctggcgcctccgtaaatccgtaaacctcccaaggtttccatctaggccagatcagcatcttctcgttgaaatgactacttcgcagatctccccgaaaaagcataatctacgggagttccttcagcctctccgggtcgagctcgagaccttgtatgatttgtcctgtcggctatcatcgtcttataaaaagttggccgcggaatcttcagaacactttattccaacggctctgacttgtcttccaacgggtcatgaaaagggacgctatcttgctgtctattttggtcagtcctaccttcgtgtggccttcatcgacctcttaggagatcaacatgtcgaaggacatgcacgggtacggcgcacgttagagaaggcatggcctattgcagagcatttacgaaaggatcattacattgatctcttcacgtggattggagactgtatcgccgaggtggtggcagacagactcgccaacccaagtgaagagcgggtggaccaaataacgacaggcatttctttttgtcttcctataaagtacagttatctcccagactcggccgtgtgcttctgtggctaatccaatgtagacaagattccctcgatgaagctatcttgatgccgacagggaaaggcttttctttaaactcagacctcaatctccgccaagccttgctgagtggatatgaccgccatacatattcaactcacggggatgaaatgaacatgcctgctaaacgccgcaggctgttttctcttccgaaattgaaagtcgcagtcatgatcaatgatacgacagcgactcttgcttcattagcgtactccatcccttccttacccaacacccgtgttgttatgggtctgatcgtgggcgcgggatgcaacacgaccgttcctatgaaacttgccgacttgcataaatccaaaactaaaagcattcttgaaaagcaccctgacgcagaggaaacgctcatctcgactgaatggactctctccaccgcggcgggtcctttcgacgagctgggtattcgaacaacatgggacctccagctggataggaattgccaaaggcccggttttcagccaatggaatatatgatcggcggtagatacactggcgagctcgtccgcatcgtctgttatgattggttccatggagtcttgggaataccacgctccgagttaccactgaagttggttgaggaatattctctttcaacagactacctctctcttgttgttgcctcttctctatccgatgagcgcttagcaagcgagctgtccaagacactccagccatctcccgagagtgattggacctggtcgcctgaatatgcccgtgatattcgggtcattgcctcaactgtgcaggatcgagctgcttctttggtggcatctgcggttgttggtctcctagactgcactaatgaggtccaattgtgcaacacggcacccaagtgcaacaatggagaaaaagtcaatacggaagctggagttactgaacagacggactccgaatcggtctcatcaccaacgcgaggttggaatagcgggcccgaagaactcgctgtggccttctcgggtggagtgattcagcactatcctcactataaagaaactgtacagagatatattgatcgacttctactgcgagctggtcctcaagtaggagggaaaagtgtcttcttgcgggaggccagtgatggcgggctcatcggaactggtgtccttgcaggaactgcctcgggggaaattggggaaatcaaggttactcctaattagatatcaactaattcccctaattcatagtcatatagatgggttataaatattatctcacattttccccctcggagcttcaccggggagaaatgcatatcacatgtcgaaaagccgtttctatataaattactgcctcgctataagtctaggcatcccccacagatgcgaggacacatggagagaaattgcgcgaaagcaatgcccaagaaaccatttgaaagaacgtgtaaacttgatgaatgctcaacacggtcgattctcagttccaagagtacacactacgtcacatgttaggccttcaagaatcacaacctctttcaatttgtagcatttttgttcttctaaatcatcacatagcagatacagtagcaactgctctccctagatcattctccaaatcatcaaatgagcagatggagtagcaactgctgtccataatgctcgctgtagtgtagcccttctgcttaccatctccagccctctttgtcgaaaagcacatcagtggccgtgacaggaaagaactgatccatttccttggatttcagaaccaggctataccagatacggattctatcaatccactcctcgcttgtgtcgatgcgaaccgcgttactgaatccggagatgtgcctgaagaccattagctcgttcaacattagaaatgatatcatggggcatacatctccccgttgttccaatcgtaaatgatcttggacgactcagacatgagtggccgatatccgcatttcacaagcttcctggttcctattagctctaggtactttgtcgtaatcagagtgccctaaaacatacttgtaagcctcgcaaaacttgtgccgaatctcctctcgcttggatatgggataactccaaaacccttttctatcaagggagtctccggggactttctcccacaccagataagtgatgtagccccccggggacgatatcgtcctcatcttacttccccgagtgatacccaaggagcttaggcacagcatcacagccttgttcccggaggtccttgagggcaatcagctcgatgtagtcaggtgattcgacggcctgggcagcacggattgtaggcttctggaactcagtcccagcgataggaatctgcttgtaaattcgcataaatgcgatcttttgggcatcggaaccggcggggcgacaaagaaactttccagcaacatctgaagggcccaacccatcggccacgtctcgctcgtcctcgacctctgcgttctcttcaagcttctcgacaatttcccaggtgccggtgtgaaacagcggttgtggcgatgagttgagggtaacctcggtgccttcaaggccgacgaggtattccaaagatgtggtcattatgggctgacagttgataaaactggaaaggcaattacaagagtttagaaagtagggtagacagagagtgaagaagagaggaagaaaagtttgtgggttgtcctagtcatcacctggtcattctcaggatacacacagcaaacaaaggcaatcactgtcatgacacagtcaaactagatcccatatcgacataactactcagttagctaccatatgcttgactttcatgccatatcgtggccatcacgtttacaccataaatattagttcccagtgtatctgattggaataacgcgagtaggtcaagttgtatgggtctctaactctctaaaataacatccgaaaatgacaatttggtgggacacaggacacgaccacaatgtcaaggatttctgaatctaagaacagaggcagccggaaaaaaagatcccaaaacaaaattcaaatgatgcggttgtgtgtgtattgaacaagacatggtgaatggaaatcctagatagagatccactggttcctaggcgtatttcggtacacgaccctgaccagctgctacgctcgccaggaaaaagaagcattgcttcgtcgaaggaggctccatctccagtgggtccgcgtgtgtcgtcgacttcacgatgggtgaatactcaattccccaggtatttcccaccatagtctgtcgcaggaatatggtctgctggtagtttgttatccagccgtacataatgcgaaggtctaacatatagcctactggctgggccaggagttgtcgcattgttcatcaccatggggttttcatttcgccgatagccttgagcttgtaggtagtcgcgggtcggttgagatcaatgcaaagtcaggcaccaggctgtactgtacccctgctgccttgaaatcaccaaactgcatggatttcatctgggcgtctagagccgctccaacaatttgtcccaccgattgctggaagcggccctagacgccatgttcgtcgcccatggagacaagctcgcgatgtaggtctcgagtcgcaagattgtggtcgacgacttttttcgaccactgttcaacatttgtgagaccccagacagagcctagaaagcttgtccactcccttagagggccaataaaagtggctttcttcaaggcagatgatgttgtgtgatcatcttcgacgaggaggtcagggagagcgttgtggataactttcttggcagttagtttcttcaccattctggtggattcctaatagaatcctcgttaatataccaagacagcgtagcgtgtaccgatcctagactctagagtctgactcacttgaagtaagagccgtagaatgtggaaggagaggatatgatgtaggaaatcctagaccacagtggtgccggagaagtgtgtagctacagtggtgatggagaagaaaacattcttttttatatgggaggcgcggtttggtagtcatctcgcagaagatgcttctccttgtttccagaggtagagatcgttgtacagctccatgccagtagcaaacaatctgttgacaaacaaaagaagcaaataacaaatatgaaacaagcaagcaaacagtgtaagcaagcatctgatccacgatctatagagtcattagtatagtctacctagttagttgtactatatggttaatgacattactattatatgtcttttttggtatctttttgggtgcccgttttggtgtcctttttgatatcttttacattactattttttaaggatcttgatactaccatagtactaccattacttgggtactatcgactcgcttaattctctacgatgtagacaggaacgacccccagaccgtaaaaagtaggacaggagtgtagctcctgggaaaaccgatggacgtacaaggagacgatcaaccaaaagtgaactgtctagatagatggaagattattatctagctaaaccagaggttgcacgtttgcaatgtttatagaagttgccagctatatcaacattcccacttcttcacttgcttcttcttcttctctgtctatcttatttatcgaatagacctggcacatcacaccagagtgaataagaataagatcaataaaattgagattacatagtcagtcgactgtataggtgtgcaaatagttttgtagagtagtttctcgttgccaagtctctggtctccgatttcaatatatatcagcccctatttggttagaatccgccaagaactgaacgcaagacttttcctcttcctctattgcgatatctcaacgcgaataatcatgaaattcttcgatgtaagagaatctctttcattttttcaagcagcctgattaacactagcaccaggtcgccgtcacattcacggcagaccaattccaaggcatctaccgaggaaagcaatatcacgaaccagattttgcagaagtcctgaaaagagcccgagaacatggatgtgaaaggaccatgctcaccaccatgactctagagggcgcaaaacaaaatttgcaggcagtgagggagttccccgcgatgtgcaaaatgaccttaggcgtgcatccgtaccatgccgccgagatctatggacagccagagtcccaatatctgaatgagctgcgcgaactaggtgaaacgctcctagctgagagtccctcgcctttggctgcgtttggggaaatcgggttggactatgagtacctggatcgggccgataaggaaacgcagcaacgcgcattccgcgaccaattagagctggccgtgcaattccagttaccgttgttcttgcatgttcgtgagtcagccaaagattttatttccatcatcaagccttttctgccaagactgtcgcgtggtggattggtgcattcttttgcagggacgaagggggagatgctccagctcgtggaactgggtcttgacattagtgtcaacggtatctcattccggacagatgaacagttggaaatggtcagaaatattccattgaacaagttgcaactggagactgatgcgccatggtgcgaggtcttgtctaatgaccccaaaatcgcgggttatctggaaactgcgaagccgttgccggcgagtcggaaacataacaagtttgtactaggccagatggtcaagacacggaatgaaagttgtactatagagcgtgtcgggttggttgtagccggtttgaagggtgtcgctatggaagaagtggctgaggccgcttggaacaatagcagtcggatgttttggttgtgaatatataccgttgagcaggaaaattagaacaatgtacaggacttgaagaatctctttttgatttagctggtttaattggatcattagaagtatcgatacttgaagctcatttgtagcatgcttaactagcagagtaatgcagactagtagtagttatactacgtaccccaaaatgcgccgtgtagatctagtagcaacaagctttttcctacgccatgaactcaaaagcaatcttggtagatcgacgtagatgtaaacaaagcccttgtatcagcgaactatgactggtgccctgaatagacatgcaggggggaacacaggggtttcgatcgccccttagggcccgggcatgaggccgagccccaaactggttctatttcacaggccacgatcggccgaaatgaagtagacagaatggagatttgtcaatctcaatacttgattactggacaattaaatctataaataattgtgacgcgtccttttttgtcttttcgggatcaagattcctgaacagaacttggctcacggagattaatacaggttggaatgaaggaagacgtgatgccttctttttcacattcgatcgctcagagcccactatgttgcccctcgagtcgttgccactatacagcagggttcgtttatatggcgatctgagtatctgaacaacacgaagtagggaaaagatctatatgactttctaatgggtgtattgagatcttaaatagactcattgattgtgttaaattgtcaattatttacccttaaccgcctatgcgaagttaagcacacatcatgatggagggccacggtttgttgacattcttgacgttgcgagggccatcgctgaaccatcagcgcatgggtatctgccattcctccacggagttatgtggaatgttattgaccactggccatgtatttatactaattgctgtcgaccagctcgatctttattcacacttctcaagcctctacactcttaaattgaccctggtggttaagtgtttatcgaagtcaatatacaaactttgcaaagacgttgtaagttaatcgctgaggactgcttcgttctttcctcaaaattcattcgatgcggccattgtcacttccgagactaacaagcgacttagaaacacatcaatcacaatgaagggcacattgatcctctctggtcttctggccaccactgtctcggctcacatgcagttgaacaagccttaccctatccgcagtcccttaaacaaggatgccaagggcgagaaggattattcttacaccaaccctctctccacctcgggtagcgattacccatgcaaaggatatgccaatgatgcctttgaggctgtggatacatggcaaccaggctccacccaagagatgtcgttggaaggcagtgccacccatgacggcggctcatgccagctctccctgacttatgacaagggtaagacattcaaggtcattgagtcgatcgagggtgactgccctattgctaagaagtaccaatttgatgtcccctcggacgcacccaccggtgatgctctgttcgcttggacctggttcaacaaggtcggcaaccgcgagatgtacatgaactgtgccatgatcacaattggtggttccagcaaccacaccgttgtcgactccgagggccgtgtggctaaggagaccccaaagcaggcgctcagccagaagacccatacccacactacgaacgcgaagagcagcttcgatagtctccctgatctcttcattgccaacgccaaccaggctggcaagtgtgtgaccgtcgagggccaggctgttcacttccccaagcccggtcccaaactgatcggcaaggccgatggccctggctacaagtgcgccgaccatgctcccttcctggacgacagctctgattccgcgacgaagtcatccaataccagcacctctacctccgccacctccactacttccaccacccccaagtccgagaaaaagcctgctgtcatcagcacctcctcattcaccacgaaggcgatttccaagatcgcccaggccctcgccactccttctgtcgcagctgactcccgtgtgcaatctgccgaggactcatccaacaaccagtttgtcgaccatgtcggtcaatggtcttgccactctggggaaattctttgctccccagatgggttgacctttgccatgtgcactaacggcaagcccatcttcatgggatccgtcgctgctggtactatttgccgttggggagctatcactgctcgccagtaaaggtgttaattctttttttcatttctcttgccgattgtttttttttttttccgcatacatcccagtggatattttgagttatcccagtctatagactgatcagtcgagtgaggttcactcgccaccgccggtcttcacttttcacagttcatgatttcattcagcctggctttgggcactctttattgttcgtcttatatttgtttcacccatgacctgttaagcgatgacccagtttatgtcgttattgtcaagcaaactacctaatgattgagtgtgttaattcaaaaattctatacatcctctcaagacatagttctcccatagaacgtcaaacatcaaagtgacaggatcaaataaagatttagtctgtatcttgtacaatgccttctcactgtgttgtcaccgtaacttgcagatggatattcacttacaatctcagcacaaagttagccgaatcagtgttggtgtagatcatctataggtctgcttatcatagagtatcaacaatcattccttccctgaaatgaattgaaaaaaatggaaaaggtggaaaggtcgaaaggtaaagtggcacctatagagacgtgaccaagcccagcgccaggcggtagtggcttgcggctgccaccgggcagcattggcttccgggtgcctatttagttaagagaatccgttgtttacttttttctcttctctatttctctggcatctcagatactcaccacatgagtttcccaatatgatcaacccgggatgactcttccaatttcctacaatcctatcagcttttacggcaagtcttctggtgaaggcttggacccgtacccatttgaatgaaagaaagggttcatggtgcgggtaaatgaaagaaagtcccggagagcgagcttcttgatagcttcggcgaagtgaagtagaacctcaaatacgtacggctcactgacgacgctgctatcatctctctctgcatacatgacaagaccgagccatcatctaccctgggactttgattcaaagggagacatcaggaaggtccgagtccaactgtaagtgcagtgtctcttttgaatacgaagttttacaataccaatgatgctactttgcataagacagatgatctcgtgtgatacgggataaatggcttgctgcgctatataccgcgagctcttacgggtcaagatctgcgacctgctggaattttcacaagaagcaacaatgatctagaacgatcaagaccccaatttttggtctccggatgttcatcgtgagagagtctatgtggggcttggtggcattgagagcaccaatctttcgcatttcatacccttcgagtctcctctcatgttcggaggtgctttgagcttcagtcaaagcgttgtatggacggccaacagtcatcatatgttatttttgatcacctggatgagcctaccctccagtagggggggggatgtatcgataatgtgtctgcagggagcctccttcaacattcattcgtgactcgtaacttctcttcccaaactctcatcctcaagatgtcgtcggccagcagagaagcagagtcactttcgcaaaccttccatgaaattgcaaacaaaatcactgactcacaaaagattcgaggttgcacacaaggactgcatcagacagactggctgaatggacatggtccttggttttgttcgacaagtcactgtgtatatctggaccgcgattcggattatacgaggcattgaaacctcacattgtcccctgggcatgatcaggtatcaattgccatgattacggaggaggaagcactttccggctacttttgtaatgggttcaacacagaggatttctatctctgtttccgatttgctgagatcctcgacatcgaaaggacaggcccagccagacagccataccttcgaaagtcagtctcctactaagatcctgaggtggagggaagatgatggggtcttactctacgtatagttgtttaccaaaattcaccttgtgccatggggccttctctgggccttctcctagtgcaaatgaagaatactacggacagagcttatgattttgggctctaggattgccatgtttgtcctgtttgataggactatgaatcgaaacatctctctccccattttagcaatgtatgcgaagtggcccgctaaatggaatgaacctggcccaagatattcaactgcacttggatcaaggagggcccgggtaaatgtagctttttcctaggtgcatctcttgcgagatctgtcggtgggcgtggatcaaagacaggaacatgtcactctcttttaaaacatgttttcgagtccctaaataagtattcgctgtgttttctctgtcccgtcaagcttcgagtatggaaaccgccaaacatgataaaccgaaaacgtttgctagagtgaagcctgtcaccaatgtagagcttgatgccttgcaaagaacgtcatcatcaacaatctaccattggttccccgcatggtcggatccggtacgccgcatgcggaaagtgaggctgaacgctattgcgtccaggaacacgaaactcaaatctagacccctgacgaagttacaggatatagataaatatttatggggcaatgtattcattaatattaaacgtgacaaggtagtctcgaaagacccaagtatggtcgccagatatccttcaacatattgtacaatccagtctaatcacaaacatagcagtggtatcttggctttcaaataacacaaaaggggcatagaatcatcggccagtgcacgagcactagtctactcagaaaagatactgtaacagcaagcatccgacagcaacctagatgttgccagtatacgccgagttaccatagccatagccaccggcagcaggggcagcagttggaggattggtggtgttcttgtttttgttccaagagttgaaccaggtcttttcgttgtggggctcggtacccatctcgacgtcgtagggggttgggtggccaggtagggtatcggcggcgccagtagccatggggctattcttattgcggcgccagaaggccttgcggctgccgttggtgtagccgttggtaggggagggaccgaaacgcttctcgcgcttgtggtggcgggcgagaaggatctggaagaggatggagatcaagtagaagaagctgggggataaattagcatgattcagatagccgtaatccggggtacactcacattccgataatcgccactgcgaagacgaccttttccagtttgcaggccatgctgaatttcagacttgccgacacggtcgaatcgtcggcattgcccgtgcccattggcgtgtccagtgttccggtgcatttatcaactcccttgcgggtcatgatggcgatggcgatcatcgcgcccacgaagcatatatccagggcaacgcccaggaatgcgaagaaggctacaccgcccagacagcaggttaaaacgacgccgagcagactgtaggcggtcgctgcacctgataagccttcaacggccttgatccatgtcgcaatgtgttggtcatttttggccaagacagccagaaaatatgagaagatgccgaggatgacagcagcatcaaggaactgcagaacacgcagtccgagattgaaaaagcggaggattaccccgccagctcccatcttgtatagtgtatatgattatttgggtatagaggtgacagtaacgacaacagggtccaggggagaatatatgaaagaaactcaggcagcaggatttgggcgagttaataagggtggaccgaaacaattggcgatcagtggatggcggcacaatagggtacaatagtacgtcgatcctggacgacaccggcagctcaatggccaacggcgtctgcgccacactctaaatgaccccagatgggcccactcggtgatgtcagtaccatggattggggagtttagggttccaccctggctgtctccggttagagagttcgccaccgtaccacgtgaggaaaaaaatcaatacaatgttgtagtgctccagccacactgccaagacaatttcaacttctaccatgacccttacactttatactttatactatccatagattccacacatatcattgcttcctatttataggtaaccagccttcacatgatcaactgttccttgaacctggtccgaggtgttcatcgagactttcagaataaagctagcacagattgaacagtatgaacttatttcatatcctttcatgcatgacacaactttcatatacagaccatgttgttcgacaccgactaaccagccactactgttatattttactttccagcgccttcatattacataatttgcctattttcattggccctttcatccatgggtgtggctgtgctgcactgccatctagatttcattgtatgagcccgccacgctgggaatgacgtctgcatccacccatctcactaggttttacacgccacgttttgccgtttacaaacattacaaacatacgaggtacaatgggaagtttgatattaaaactgggtccgccacatggaatggcacatcctcttggtggtcaagtttgcggggtaaccagaacgagatgcagtatagcaaggcgagagagattgaaaaaaaaaattaatatgtgcccatatggtacctgtgagcttgtgatccatcaaatccccaagctagcgcgtgtcgcctaaataaatctaggatatggtgctgctaaccggacgaagcacatttttagtcaggagcatatttatgattccggccttgtaaagattccgtcatcgacccggacggacaagatatatcggaccaatgctaggtaggtcgtagagtggtatgactgccgcccaggttctcgggcctatggacacctgttgcccaaagctgttcaaatcaagcgagcttcttggaaaaacaggaatatggccattaatgcaggtgttgggttgaccttgccaatgtccagggatgtctagcaatgaactctatcaggctctcgtgttccaacccatattttactccattttgggaaatctgaaaatgaaagcggcaaaatcctcggcagtagctcgtgaggtatggaagtggacggtatcttcttgtcgaccatcaggagtcttcctggcgctgcttttcttgttcagcgaaagcacggagaattgaatccagtccctcattacggcgagcgagtagcatcacgtcggatacattgacggtagatctcccagcgtgcctgaaaaaaaaacgaggttagtacatttcttattagatgtatgtaccatcccgaacaattggctactcaatcgcagcaatgcgtttgcttacttcgcaaaggattctagatcctggctgaccgtctctgcgaacatagtcagttataagggtaaagccgggaacttgaccaaaaaagtggaacttacctatctgagcccaaaccatctctgtcaacgcaccgatgaactgcggagtggcattgacgcctagcctgatagtctcctcatccacgatcttaccgatagacaaccacagcgcggatttcaagcgctacaaaagagagttagctagttacataccaagatcctcctgagactgacctcctccagactagcctcttcagtctgctccatggtgatgtgatagtgcaagacaacaagccgagcgcgtgcccatataaaaccaacaacatatgattggccgacgacgcgtccacggattaacggctaatccggcaacagtcccacgctaaccccgaaacagacatctctcgttgcgggagccacggaatatcgaagaagcgcaaagcaatgacagatcccctcaattaatccctcaacccttaatcttttaaaaatcccccctactccactctcaactccctctgagtgtcctcttctccaaccaccccattcagcgggtagccaccgagcacctcccaccttccacaagccctcaaccaaaccaaaaaaaattaccaccggccaaatcacacacacacacacacacacacacacacacaccatggccacgccaaagcccgatctgagcgacgcggccgccgcggccgccgaagatttcttcagccagatctacagcttcttcgagctggttgtcacacggctgttcaaaaacggctacgcctccatcgtgcagatgaccgagatgagcggcaagcgctgggcccgagtcatcggcgtcgtcgtcgtgtacctaattctccgcccgtacatcgagaagatgttcaagtggatgtacgagcgcgaccgtcgcaaggagaaggaaaagcgcgagaaggagagggcgcagttcgggaaggtcaaggtctcggcgaactcgctgcgtgctggtggggacaaggggaaggtccttggtgaagtcgataacacggatgacgagctcgaggatgaggaggatgttatggctgctgctagtggtgttcctgagtggaatgacttggctcggaagcgtcagaagaattatattaagcgtgtcaagaaggatcagcgcgcgcaggatttgagccgggagcagattttggagttgttggattggagtagtgaggaggaggaggtggatgcgaaggtcaagaaggatctatgagatttcgacttgtcttggtctagggctgttcttgtatctgtgcattgcatgggaggttatgctgcttgtattgtttaatactagattctaatttaataagacctccacggtctctctagctttaagcgaattttctgatctactcgtagcatctctactgaggactctttaccttgcacataacatatacttggaagtcataaatctactatttgcatctaaagaatgcatccaatccaatcatacccgagccagaactttatcctgggccgttctagaaactatgtagcgatcgccggatcttatccgtattcatgaacaattcgtaacatatcaccaatgtctcgcaagagatcagtgaagcctccgtaaggcctcgatcattctcttgacctcctgcacgtctgaggagccaacatcctgcacaatctcctcctgcatgcttggtgtgcagtgcaagaactgctcaataagttcgccgtccacgaaccgatatggtgtatcggcgctgcgcaccatagttctgaagccgcggaacttgtcgaatgataagttacccaacgaggtgactttggtagaaaggacagattgcagggtcataaggaagtcttgatgttcggggttgataacggcgaagaggaatatagagccctcgacctttgaatgggttagtaaatgagcctttaatgccggtcaaccaagtcaacaaggaacttactgttgctatgaacgctcgcggtgtcaccgtaatgctggacagctgtggaatattaactggtcggatacgattgaccatctcccctagtgacatctcgctagtggggatcaacctgtgcttgtcctgggcggtgactccattcgtattccgagcgagaacgataaggtttccctcggcgtcgctctggaggaatgtctcgtccccaacacaggcaactgctgtgctccagacggtctggtagtgacgaccgacttcggtcagcttggcagcttccccagcgtggcccggtgtaaacctcacaaggcaaaggctcttcatgagatctgccactgcgattaagttgtcgacgactgttacatcgactggtgcggtggaggtccggtatgcaacaagcttctcgagcttcattggtccaacgttattggctttgactctatacacaacaacctaatcatcgttagtacagggttcaaacatacacgcggttagtactcacagtcttaacaagtgccgcaacaacgcagtcgcccatgatagcgagggcccgacaggcccccataaccggcagctcggcgacttggctcagcttgcggccgtggtcgacttccagaatgaggatccgcccgcggatcgattcttcctggtcttcatctgcaaatgccgtgccaacaataaagcggtccttcgtgatctcttttccattttcatctttccctgccgggagttccgcacgaacaacgctctccaccagttcgtcggggcccatttctaacgcatcaaggcgccggaacatgatctcatcagcaaggacaaagtagcttttgacaacctcggcgccattctcgagcttgcgatcaatcgtgccaattccaaatgccttctcagaaggggagtatgccacacgacggacagtcgagcccattggtaaagtttgaatttgggttgtgcgctctctgtcaaccagcgcgatcttcagctctttctcggttgccacggcgatagaacctgggaacgcctctgcatttaaatggcatacccgtgatgcaccctcggagttcactgcggagtagatgatccggccctcggaaccatagattaggctgggattctcgcaggtagcgaagacgttgtatagcccgtcacccttggggagtttcttgaatatgggttgttcggagccaagaatcagcttgttcatctcactaagcgagtagtcttgtgggttgagtgagaatgtaatgacgcagccatcagccatggagatgaagagggtaggctggctgtctgcgagcacttcggctacaagaactgatcgaggaaagctctccccagtagggccgagggactttgtttggagaacagtgaagtccttaatagccaggattgacaccttggccgattgcgggaaccctgcgatgcaaacccctgttggcgttgatgggacggtcagaccggagatttgctggtcagcgccgagatctttctgcgtgatgatctggatattgtccctgatatcaaaggatgccacgacttggccgctaataacgagaaccagatggtcctcattagccgacacggcggtgatcagcttctggtcctgaggagcccattcaaatgtcaccatgccgctttctagatcggccactagcactcgttgttctgtgacctgaagaatacgaccgccctgaagtcttgtggcgagaagagtgcattccgtgagtgaaagccccaggaagttatccaattcttcaacttcaccgtcagggttaaattggaacacacgtgtttcgtcaacaaatgtaacaataagcgtatcaaggaagtcgcctttgcttcgagtttgcagtccccagagatcagtgatgtgttccatttctcccagcacacctaactcctccatgccaacaccactccgcacactgcgtaatgtcccgtcgtcaaaggcaccagaacccgtcacaatccgagcctgcccagatgaaaactcatgcgtttggctctcgtttgtgcggttcccaagatccataatagtaaaatcgagaatcggtgcgatgttagacaatgtctggatcacttcaaacgagcttccgtcgagccggaggacctgagagtcgccgtgatgcgagccaacaaacaacatgcctccgccgagatagaccaggaccgatgcacgagacgtcttgcccagatactcgagcttccagtcatcaatttcacctaagttgttcaggatgaaagacaagaaaaatagccttccatagtcatcagccaatagccaccgctgactatcgaccttctcccaggccacgaagaccgtcgcttcgtcaagattccgcgtaatcacatcgttggcattatcgtcgatatacttgatcgacgtctccccaagcacaatgagaccacccagcggagccgggatagggataagatgcgacgatccaagatcaagctcctgtccaaattcacccccttccaacttctgcacctccttgaagctagcatccgccggagtccccgaagtgcccggcgtgaaatccaactcgcggattcgaagccgcaccttctgctggttatcttcatagagcaatgccaaccaaggattagattccgaatgcaagaatgccgaagaccgaacgaaaatctcgtcgatgcgggatgcagtcggcttatcaagttcccccacctgcaacggcaagtcagcctgggaccctgccatcggcacccggcctcttttcttcgtcggctgcacgatcggcacaacaacaatcacaccctcgtatacttccagcgtcatgaacctccccgtgggatcgatcagacatcgtggtgcgcattgggactcccggcatgagggctcggagatatcaatacacgagcgcgcagtttttatctcacttgattcgcggtcccaggttattgtaaaatagttatattggtctgtgccgatgaagagatggtcggttggggaattcgttggcgcgggtaggcgtgcaagcatagtgacccgcgcattcagagcacgggtcgcggtcaggacgagtccatccggcgtgagcgtgtagaactcaagacgactggcttttctgtgtgttggcagggttagcttgtcatcgggcggcgggtcggcttaggttccgtagattggcgggatgggactcacgctgcgactaggcactcctcgtccggagagaaaaagtttagcttcactgcatggcgaatgctgcttgcccggtggatgggcacgacataagccatggtgattcaatagcccgaggtatctggacagcgcggagctggttggggcttaagcttcggcgcagcaccctgcgggggtgggatatctccgagagtaaaatgtacaagggattgagatggcggaggttgacggtgttgatttatagattgcacattctctagttcaactctgttagggtaggattgcttagtcggtggggaagatgaaagaggttgaggttcccgtgcaaatgacgtctaaagtccgcgcttacaaccgaaaacatctcgacagtcgttcttagttgcaattgaataaatagttacatacatgatggttcaatttgaaagaaagagaaaaagattaaattccttttaaaatcacaagtctaaagtcatacgccgcccaggcggcagtcatagctaacaagctcaaggtcctaacgtgaggccaatgataggaaaacatgcagcgcgaaggaaacaaaaggcgtatcgtatggaacaaaatgataatatataggcgcgatcatctagcatggtgcaagtgcaaagaagtgttcgtaaatcatgagatcatgaccagacgtcctcctggtaactgccgctgctacgcatgtgcttgaccatctcctcgcccttctcagcgggcaaaccccgttgctgggcaataatgtgaccaaggaccaaattgacctcacgggccatgttggcagcatcaccgcagacgtagaagttggccttttgcttgagcaggtcgctgaccagctcggcgttctccttcagacggtgttggacgtaaatcttctcggctccctcgcgggagaaggcagtaataatcttcagggagtcacccatttgatcttggaaagtctaatgaatcatattagtatgaatgtgggatttcaagtgtaagagggtattgtcataccttgaactcatccttgtacatgaaatcctcgtcgctcttacggcatccaaagaacaatagtgttgtgccaaccttctctcccttggcaacaagagcagcacgttcctgaatgaaaccacggaaaggcgcgacaccagtaccggggccaaccataatgataggcttggccgggtcggaaggtagcttaaagttggagtgacgaacgtggacaggtacgtggataccatcgtacttgttgcgaggaccggtgattgagtaagtcaggccgtgggggtcaggggaaggatcgccgttctgcttctgcttgagagccaggaggtagttggtggtgacacccttgaccatgtgcgaggcacccggcagacgaacagactcgacaacagcggtgatgctgatcttatccttttgaacgagagatgacgaagagatagagtaataccgaggctggagcttgttgagaccctcaataagcaacgagaaaggaacggcagtgaacggcttagaagtgatgctttggagcgcctgggcaatggtaaagcgctggtcggcgatcttctcatggaagtaatccttatcgttacccaagcggaccatttcgaccttgctctcctcatcgggagcgaaagcagcgagggacgagacaaactgacgagagacgggggcgcagacttccatgtagtagcggacagcggcatcataggtggtcggggtcgggataggaaccttggcagtgacatcgatacccttgacgttgatcaccgagtgccgcttctcctcaagaccaaagacctgaaggaagcgatcgacttcggcgccagcgttcgtaggccagatggcaatgtgatcaccagtctggtagctgaggttgctaccagcgatgctgatttccatgtgcagacagttgcggtccttgacggtgaacagttcagaggattcaacaatcggggcaatgtaagggttctgcgcggagaagggacccttggcgcgatcttcacggtgggaagcagtaggctcgcccaggtagacggactcgtcctcgggggatttctcatcatcctcgacaacggagaaaacggcttcgtagacagcttcgcgttcctggagactcatggcttccgacagagcagcccacatgggctccttccaggccaggaaatcctcttccatggttccggcgccatcgtcgccctcgccagcagttccaatgcgctgcgcaccaagtttggtcagagctgcatcaacctgacggaccatggcgttgtagtgctcataggtgttgtttcccaggccaaatgtgacatacttcaacgaggacaaaggcttatcttcggcggaggcgccgctctcgaaggcgacgtcctccccggtgaagaattggtagaactccacggcgttatcggtaggctcaccctctccgtaggtggccagcacgaagaatgcgaccttatcatcggggaatttgtccaggttctcgtagtcatagtcctcaatgtcagcgaccatagtcttcagtccgaagcgctgagagccttccttggcgaggcgagatgcataatcctctgcagtaccagtctgggagccgtagaagatgacacagttcttgtttgtctcttccatcttctccacgatgtcgcgggtcttgccgcttttagcagctccattctgagtggcggccgaggaggcatatgggtctttggggacagcccagtagctacccttggtgaaataggcaacgctacccaccaagagagccaccaagacgaccaaatcgagtgtatccagctgcgccattatggtgtggtgcgtacctcgcggggaacaggggaggggtttgttgaggcgcgaattcccgccgggaggggagaattggttgaatatgttccaaagccgggagagcaaacacacaaaggcagtcaagtaaaagaagttttacttcggcaaggatgcgcccccagcaaagaggtctaaacgacgtgtatgttgtacagaataggaagaggaatgagagaagccgacaggtggtctgatcgatccactcgtcctgggcttccggactttctgtggaccttcacggggcaaatctcaccgctgtctgcttacgttggaaactccgagtgtgaagtacatacgaaagtacagaaaaaggtccgatagaatagaaatagcgaaaagtagatcagaaaaataagagtataagagtataagaatataaaaagacactcagaccacccaacccgttttatagtgacaatcgccgagggcaagtcttcggaagcaatgtcggccccaacatgtatggatcataccccgtactccgtaccgtccggcatttttcctaacgttatctagtacggaatatcaaatagggacattccccggccctggagaagaaggcggagctcgggtaagagaagcggctttgctgttcgggaaacgacaacaggcctatgttgtctctgtcgttctgctgcggaatagattccgctctccttccgttctcttcgcttcgagaagatctacatcagaacagctcgaggcttgatagttcccctaacgtggcaaattgcctttctgggctctcggaccccggccttgacatccctgacgtgtggggaagatcgtctatgtagtgcattgtgcgttactctacggagtcgatgttgttgagcttcgacgtttcttctttatatggtgcatatatttcccctggccataatgagaactatattttcaggcttcatctatcgtatagattctgagaatattgacaatataatatcttacaggcgaatgatgtgccgagcccctgatacgttggggttatatatatccaaacacagaagaactatatcatacccaattgcatagcatacattcctcaggtccctccacgggttctcaacgacaatatacatttgtttcaagtattctacttcgtaccccgcgcatttgaaaccatccgatccgacgtcccctgagatccttgttccttacatcagacctgcagctcgactatgacaagcataactattatactataactatatattagaggaaaaagaatgactggataacggctctggatatctcaatttcttctaggcgatacaaaggaatggaaaaagggtcaacaacaaagagaagccaatagacgagtgaggctctgtgggggagacgtaagagccaagactacgcacctgggacagccctggaatgcccgatggcaaagaaatcagctgaacgtgtataatatatgaaaggaaacataatttccaggactatagactatagagggtttcaaattgatcaataatgcaaaatgctagttcactagatataaatacatctaatctgaggcttaataataattctcctcccagatgtacccgagcgcccgataaaaacatcaagctctctcaactcttatgccttcacaccccttggcttcttgaattggctatgtgcagcttgcaatctttgattcctgacatgggctgcttgcaggtttgagcaatgaggtcctcataatctccaacagtacgtattgcaaacactatcgttatcggagcaaacggactcggtctgacatatgaatctccagtggcttcacaccctgccaaagccggcccaggccaggcaatcctgcccctcattcccgacgacctcaaatccgcatcgtatcataatctcgcatctccatcagaacgccgagggaccaggaccgcccagtccactcctttgcacagtcgcgagtcctctgccgtccgaggaagacaagttgatccctccacgctcgcccctatccatcctcgacgcggtcattccggttccaagagccccgacgtatcgggcagtcgccctccaggatatgaagtggggttagagagacggccctccaactcgtatggtcaccaccggcagacctccatcgtacacggtatgcagcattcacgaaacaccagtatggccggatcaaccgcttccacgagccctttgagcccggagatcattgcttccctcggtcgcggtgcgtttgacgaggcgacccttcctgcgaaatttgatcctctcgagacgcactccggttattcgacaccgtccggaatatccgttagtcatgcgttgccgccaacattgagtacgatcaaagacaatgacacaacactgagggatgtgagtccggccgccatacttcacaaccgaatgaactcgggaggaaagccgagacgcgagcggtcagatagtcgttcacagtccaagcatcactcggaatcgaagacggttggggaatatgcattgcatcatctgttcaactcatttgtgggacaggcggacaacaagatcaaccaggccatcatgaagctgggggaatccgatgctcccgtggaggaggtttgcggcccaggagcagatccgactttcgatcaattgatatcggctttgggacatatcgctcggcagaagccgaaacctctgattgacacaattatgttctggcgcaaggctaagggtgatgctgctattacagcgagacagatgctgaatgagcaaagaccctcgtccgctgccacggaaaatgtccctctcctgcgccgcaacactgagccgacacagccggctgatcccactgcgactccagaacgggcgcagcaatcgatgccctttatgggtcgtcccgaggaagtcgctttgatagagcgacgcgcaacggtctcggtatatctagtctgtagagtcttgatcgagatcttccatcagagtagtctggcttcaatcactctggacatggcggatcgcttagaagacattgtgtttggccaggtgaaaacctctgacccggaccagatctcggcgtcacctctgcgaatggccaattggagaatctatggccagttgctgggtattatgagtgaatccaatttctccggcgttgcgaatcgttacttgatggaactggagcgctaccagaaggaggaagttacacgggggccatcccgcgaaagcgattcaaagtcggaattgttgatcctctgcatgcgatatctgcgtttgcctatgacttcagaagggtggccaaagtcttgtgatttcatgcgatcgttggcacgcttgtttgtgaatgctcatgggcagcgcatcaaacaggcatactgctacgtggttgaaaagcttcttctgcccgtcgctgccaacccaagctgcgatctttcactgcctcggtggaaggaattcgtggatttgatccaaccgcgcttaacacagcttcttatcaagcctcgtcattggacatcttccttctcgttgaatgtgctgttgctttgtatctccaacaaagagaccttttcttcacaatggcttcctatgatttcaagcttgcctgcacgtttgaaggaccgccctactcgtgcacccgccctccacgccatctgtcgtctggtttggacctatttcttccgcttctccgattcccccacaaccactcttcgcaaggtcgaagaggtggcaaagattgccctgccgactggcaagaaaacatacatgagtgcagagccggtctttgccgatccgttgatccagctgattcaaatcatcggtttcaagcatccggatgtctgtttccgtagcattattttccctttgatcaactcggatctgttcctatcgggcagagagttgaagatagaacagatggagccggagaaaatggttatcggaatccgcgcttttctggctacaatgtcggatctggagacaagtgaccaattatgccctccgatcccgactggctcgctcccgaatcctttcactgacgtctcaacccctgtgtatttccatcgaccccagctgctgaaagagtacaaagcgcctaatgcttctcagaagcaagacccgaccacatggcaacctgtcaataccgcgagactaagcgataatgtgaaggaatactatttccgattttgtgaagtcttaggcaagatcactttactctgtgataacacattcggcggccaagcagttctggacgagaagttcggcggaactacgcctaaaactccaatatcggaagctttcagcttcggtcgtcgtggtgatgaccatgttacaacactggaccagaagcaaggattctacgatttgctccatgtggcagtccaagcccttcctcgctgtctctctgaccacattccattcaactcactcatcaatcttctttgcacgggaactgcccacgtccagtcaaatatcgctacttcatcagcggagtcgttgaaggctattgcgcggcaattgcacgcccagcaagttacaatcggctttgctagattcatcttcaattttgatgagcgctactccactatgtcagacgaaggaatgcttggaccgggccatatcgagtccactctcagactatatgttgagttactgcaaatatggattgacgagattaaacaaaaaacaaaaggcgcggcagcgatggatcaactggagagatccatttctggcagccgagctctgcaccttgatttatcgagtgtcctcgcccatgtggaggagattgagtcacatggactctttttcttgtgttctcaatcaagacgtgttcgagcctttgccatcactgtcctgcggttgatcacggaatttgacagcgctctcggaaaagaaaacacaagaatcatccggatccttgaggctgattctcagcaaatcctagatgtgaatgatgagcatcttaccgtggcagagcgaagccgaatccaaaagggcagaagaagaagcgcctctcaaaatactcttatcgaactgtgcagcagtgaagtctcttatgattcaacattgtgggccaaggtatttccgaacatcatccgtgttagcttcgagacttgcccgttcgctgtcaccctaggaagggagattgtatgtgcacgccttcttcagatgcacgagattatcacgtctctcgccgagagcacaagatttccgcaatatgctcctatggatacgtaccagaatcgccccattgtaagaaccaatgtgacatctgaaatccttgtcgagcaatggaagctttacttggtcatggcatgcactactgtcaccagtgttggggctcaatcgcaaagccagctggcaaatgctcagcatgcgcgcaagacttccaagggaacccatcaatctcaagacaagatcagctccgctcgaagcctctttgcatttgttatccctctcctttctgctgaacgggattccatccgcagtgccatcgttgttgcgttggggtctattcatcaaaacctctatcgcacgctccttgagtctttgcagtatgccgtcactacttgcaacgaggaggcgaagatgagaattggcaaccactaccgcagtcctagcagcccccgccggaacaggaagactgatcgtttgcgcaccgaggtaacgaatgtttacaaactcacatctcacttccttcaagaccccgaggtttacaatgacgactggatcgtcaacaaccttgttacatacgcaaaagacattcgaattttcctaagtgatgccgaggttcagaacgactgggaattccagcgcttgcgattccatttctgcggactgatggaggagatctttgaaggtattaatcgtgctaaggatccttctcgctggatgcctttcgagtcgcggaagtctgctttctctcttatggaagactggtgtggatactcgccaaatcaatctcaaatctctgaaagagaggagaatatgcgcaagtttcgcatggcccggccacatgagactggtgaaatgaaaaataccgctgctgctatggagattgagaagaagaatctacgcgcggcagccttgagtgcaatggctttcctctgtgctggccccatcagcatcaccactgaaagtggttctgtcctccaattcgacgtcactcgcatgctttcatggattgaaatgatcttcaacactgtcagtgacaaatggcatgccatcggccgccgggctctgaagaacctcatcattcacaatcaggaacactcctatctgatggagcgatcaattgagatgtgctatgttaccgagcggcccaagaccattgagagctacttcgaagtggtgatgcaggtgctttttgaatatccggactatccactggaattctggagagttctaggagcagtcttggtgacactgggcaacgaaaaacgtgagatccgaatgaagtctgctaagcttctccgaaaacttgaggaacgccagcagaagaactccaggattcaagactttgatattagtatctcagacaagactaccgcagtgtacaagctggcccagttcgagatttcgaaaagattagctagtcagcattctgacttagcattcgctattttctcggagttttctttgcatttccgcgttcttggacctgatagccagcgaaatatggttgctgccatcctaccgtgggttcaaacgatggagctacaggttgacccgaatggcggccctacagccaagtcatacatgttgctcgcaaacctttttgagatcaccattcgttgcagttcagtcctgcctaaccaagtgcaagcactgtggcaggccttagcaacaggccctcacgggggtaatgtgcaactggtcctcgactttatcatcagcatctgtttggaacgcaaggagcaaaactttgtggattacgccaagcaaatggtcgtgttcttgtctgggactccagcaggatcaaaggtgatcgagttctttttgttgcaggttgtgccaaagaacatggtgcaagagcggaaagaactcactccacctcctcctgacatcgcaagtctgccatatgttgcagatcttggggtagtgctccctgtcggaaacaaacaagctggtctatcccttggacaggttgccctgatattcctcgttgatctgatggtcgctccggtgactctcgctctgagtgatgttgtcaagctgatccacatcgttctcatcctctgggatcattacacaatgactgtgcaggaacaagcccgtgagatgctggtacatcttatccacgaactgatagcggcgaaacttgaggacgatgccccggcgggtgcccggcaatcggtcgaagactttgtggaatcaatccgtaagagcgaccccgcggttgtttgggaatacgaagagaaccatagtaaagatgaagagatcgatgatcgccgggttcctgcatctatggctactgtcacccgtgaggtcgtcaggttctttagctttgcttacgaaggtgtcggcgatctgtgggccaaggaggcattgaactgggccacctcgtgtccagtacgacatttagcatgccgctccttccagattttccgctgtatctcgacatcattagattcgcggatgctagctgatatgctcgcccggctttcaaacaccattgcagacgaggaaacggattaccaaacattctcgatggagattcttactacgttgaagatcatcatcagctccctagcgccatcagatcttttggattatcctcagctcttctggacgacatgtgcttgtctcaacacaatccacgagactgagttcattgagagtattggcatgcttgagaaattcctcgaccgggtcgatctcagtgactcagttgtggtcgccaacctcatcgagggccagccaccaaactgggaaggcggctttgatggtatccaggaccttgtctttaagggaatgaaatcgtccgagtcctttgatcgtacgctcgatctgcttcatattcttagtggtcttccaaacaatgatctcatcggagatggaactcgacatctgtttactgtgttggctaacctgccccacttccttcaatgcttcaaggaagggttcaacgaccccaagcccatcgctcgtgccagcatacttgcccgcgtggctgagaatgagggatgccctcgcctcgcagcatctttgtttgggtttgccaatcagcagtacaagaccgccggggtcttcctcgaccatatcatcaccgagatcaagtcatactacttcccccagctggacttccagtgtctcatcttcctcatgggacttctcaccaacaccacggattggttccgcatcaaaaccatgaggatcctctgtgtgttgattcccgaggtggatatgcgacgcaatgaagtcacttgccatggcccagatctgatctccccactgctccggcttctgcaaaccgacctctgtcctcaggccctagaggttctggataatatcatcacggtctcggggaatccaatggagcgccaacatcttcggatgagtatggcgtcggcagcctcttctcgtgctatccgcaaagagtacgagcgaattcagagtctatacggaattcctgaaccgacgggatggtcggttcctatgcctgcaacccagtcaagcacgacccggcacaacgtccacgctgtcttctacacatgtgttgaagccgaagacaggcaagaggaagatgctaggacacctagcgtggccttccatgcggatgaatacagtgactcgttcttcccaatgagagctgatacgatgaaatcaatcgatacgcaggttgatggcaatatgggagatatcgtgcagaagctggacagcttagatgacttctttgaggatactgatacaatcactcctgtgctgaaccccatcgctcctccgatgctgcgaggattcactggtaactatgtggataccaacgcacatctgtatgatcagcagaccgcgccaattttgcgggaatcactcgctcggacaggttctacatcgtctttccataatggtcttgccgagtctcgccctcccaacatccgcttcgacggtccgggtgtgtactccccggtaacggcgataccccaaaacgcacagctactacgatccggttcccatacccgctctgtcacttcccctgccaacaacatgtatgcgcacacggcttccaatgcccccaattccacactgccggttgcattcggcgattccgctttactgtccgatgaggatccggacgaggtgcattcggacttagacgaacgcccggtaaccaagaagatgatcactccacctgcacccatgatccgcagtgcaactgatggaccacactccctggaatcaaggattcgcaacggcatgcggaggctgactggcggcgcagccaacagagaaaaagagcgacagcgggacctccttcgctcccaacaccgcgccattgtgcaaacggccaactcaccccgcgtccctaaggtacccgaggagtatctctcgggacctaccagtcacccggcatcaccgaggtgaggttggtacatatctttgcccttaacatacgtttctgctttgtcgtttcgctttttcttttctgttgtcagtccttttctaggctgcctgggcatttcttgggagtttggatcactttacatacataccccttactcgtccatctacttcgcgatcgatcttgtctatctagcgttgatccgcgcctctgcatcctgtacaatccatgtagtcagtcatatcctggaagttgatgggcttacatattaggtgtttgtcatttcaataccgaagtcaatacatttgaatttccaaggtcatgatgttgtcagagttcaagtttatgcgtctttatcaagaataccacgttgtatctatacattacgaagcgaagcgcagaacattaaggaggaccccctgccgagccgctataccgagaaaagttgccaactacgtccccgtgtatgcgaatgagttcctggcagttgaaacaaggtctgacaccctcttccatgtctctccacggagagaatcttggtattctgccgggcccaggtctttccactgcaaggaaatcccatacacgttgcggttttcttggaaaatatagcagtcacgaactactttttccgattcaggaaggaataacccatactaaatcatggagccgagcacccgtgttttcagtgactgtcgtcggctttctcccttcaagacagcaacgatttcaccgagcgtctccggtaaaagaatccgggccacttcttcagacatctggtagaccatgtagaatttcccactcgcctcaaaaaggacttccccccccctgagcatcgcacatgatagggatgcatttcccaagctcatatttagtagcgacatgatatccccaagaatctaccgctgcccattcaccctcgtagtcaagctcttccgggtccattgtccatcccggtggaggggacacctaggtacattatcagtatcacataatcgtgcgctcatctcagatgtttgacctacagaatattctctgcccaccatagcaatcggagtacggagtagtatggggggatctgcgtgatgtcaagccgggtgacccactcgagcggaatcttaattaccgccttcttaatggatgcaaccggcaattctgccaacatatcttccatggaatttatagtagaatcgaaattggcactttttcttatagcttcagggcaccaactaactgtggatgcgcacggggcatctttctcatgacaggcatttggagtacatcactgctcaatttgttattacctaggcagcactaaatcgagtacatacctagaggggaaaagtgactgtattatgtatatttttgggataattctaccctaagattggccatatcggtaagagtgactggaggtcgtcttaaacctaaaatttattgcttttcaagctatgaagatatactcattcacaattacgaggtctagatcggagaagcaaaggtccgtagtctttactggtccctcctttggagcccagaaagtcccttttgtcggggctggctggaattctgtctcaaagaagtcaatcttctctttatgtgccagagcaagatatcgacatttgtctcgtttttgtgggtcagcggaaactgtactggattggattcacaaatgatgcgtccggtagagcatgtagacttacccataagaagtttaattgggcagaacctcacttcatctttcacaatatctttcaggtctggttttctatagtgttgaagacctcgtcttcctttcgaccctcctcttttttcgggggatttgcatcaatatacaaagcccaacggagtacctttctaaatcaacgtcattcgcaggcatgcagaagaggttcatcgcctcagcactgaacggaattactacgccaaagaagatacgggatcggacattcataccgattaattgggaggcttgcatctaaaggagcgcgacactaaaacttgtgtcgcgctcattgccccacccaaacagctccagtgtccccactatccagtgtgtccttactatccagtgtgtccctactatctagtgtgtccctactctccagtgtgtcccctcctgcgggatcgtagacaatctataggttctactcctaagcctttgccttcttccatacgcggcattcttccatacggagatctcttccttatggggccttcttctatatgtagaattgatcattggaccgccaatctcagctatattctcgtaaagtaaattaaactattgggataatggttacataaaatctctgaccgaggataggaaaaacaaaggttctttcaggtaagagttccgcttcggtcttatgacttcatataggttgttgcggtgtatctttaccaacctgctgtacatcctggtctgtcactagcatcggggctggatagtaggagctcttgataggtcagtcatcttttcatcagagccatagtttgagacatactaattgtgagctgaggaaagcccagaatcccgaagtatccgctgataaaatatgtacctggcccgtctctcggatacgaattcccacgcacacatctgcgctgcacatcctactatattcgcatgcctttttcatcagacttgttttgcggcggcattgtttttgccgcatcaattttcttttcgaagtggtatccttggacttggtagccttgatagcggccattgggtgcgttgccttgatatctggaggtactttaacagtagagaagcctatataggtagcagggactctgaaaatttaggtccgctaatagaaaggggctcaatgaatataaatgttattgcacgaaggggagtctttaattatagagcgcgaaaagaccacgatattcaaagaccacgatattcttcaaattattgcacgcaaattggtcctttatatattgaactcataaaagtggccccgcaggacttgaagggcaatcaccagtgttatttgcggtcatcaaatgggtgcggcaacgggaaagcaaccgtaggcgcttatgtttacgtatcttgttcacattgcgcttttgcaccttgtaactattacgccaattccctatgtccggttaacaccgacggagtaaaaaattatcgattcataatctttatgataatggaatattcttaggggtctaaaatttcgggctatgaattttactatcacttgaattatatcaccttttaaaatttcgggctgtggattttacaatcacttgaattataccgcctcttaaaatttgcatgctgcaattttcctaaaggtcgaatattccgaacacaaaattttaaagggatcttttattcaggctcatttgaaattaccttcttaaagttcaagtcttattattttctcctcgattttatctacctgtctcggaaatttattatgtcccagttctaggaacgtcagaactactgcaaagggagagcgaaggtatacttgcaccatttccaaatagataatgtggggcctcgaactattcgagattcgcatatagcccggctggacagaatttttcagtcggaagggttttctcgcctgaacccagagaattatgtgaaggtccaatagcaatgatgttcttcagcaagctctgactgcccgatgaaactgaggccttcctaaacggcccattgaactttttaaaccccccaaatgaagtacggctgaatattgtgaacgatttatgttatatttgggcagttggactggaagcaaggctttttttggctggccctacaacggattatgcggatgaagagtcattagaatcttttctggcatggatcgacaaccaaagagccatgtgatactttctcagagaataagaaactgctacatagcagggcggtctatgtagaaactgctagataggagggaagtctatatagaaactgctacatagcagggcggtctatgtagaaactgctagataggagggaagtctatatagaaactgctacatagcagggcggtctatgtagaaactgctagataggagggaagtctatatagaaactgctacatagcagggcggtctatgtagaaactgctagataggagggaagtctatatagaaactgctacatagcagggcggtctatgtagaaactgctagataggagggaagtctatatagaaactgctacatagcagggcggtctatgtagaaactgctagataggagggaagtctatatagaaactgctacatagcagggcggtctatgtagaaactgctagataggagggaagtctatatagaaactgatagcactctagaagcgtagcgaattgccggggcatcctagaggcggtcggcagaatgcacaaaagagcccaatacagatagcgactacgaacataaacgcatttgagccttcgagcctttaatcagacacaagatataaataaacttccggcacagctttcaaatgacatataacactaagtaggaagctcgtgggcgttaagccgagttgtggtgtctaagcatgaggaagagaagctcgcgaccaatggtccacttgtaaaggagaagaaccttctatggatagcatcctaggtactcatgagatacccatttcaggacacgcatagacctatgctgcttgtaccaagagcatgatacagacaagacgtatggtgccccgaaagaattctaacagaagtggtgctgggatgaaagacagatcttgtatctatgatggagctatgtagagtatcctgtagggtgtgaaataagaggacgttaatgaaacaccactgctagttggaccatttcaagagcaaggtttccttggaaggccgagaacaaaagacttctttcgagagggttcaggtcatgggagaatcctcttgagaggaaataagtcacagtacggctaactgaagagcacatacgacacagaagggtaaacgtcatatgagctgggtcttcatgctatttctctcctaatccaattgttctgggcttgggctggttttgagatggtctagggcgaccacgaattgcggatggcggtttagccagacgccgttcagtgaggattgcgttcattggcttattatcttgctgtaggagcgggtctctgcagtagctttcattggacgacagtgtatgctgcggatgctagacccgcgttctcgtttcagagcctcagtgggcgcttatatacagccactgaaaccgtcccacgacgaagaaggcggtatcaaagggtgttttttttggcccgctctctgacttgactcgttatctcagtcaccccaccttctacttcccgctaaacgttggtacatacgcacagccgaatagcgggcaggaagatggaaagctgcttgcttcagttcgtgggggatcctgaaacggcgcccagaaatgaagttgtttggagactcatcaccagactcgatggagccgcctacgaaccgcctattcatttgtgggcaaagtgcaatccacccttcgtctcaacaccctgtatgattatgtctgctcccccccttcagacccattaagcctctaataacaactaacaaagaagcagtagttgatcaatttcaaaatgaagcatcaaaacaagatacgaagacagtccactgcctgcaaagaatgtcagcgtcggcggacaaaggtagggaatattacaatagtatagatcttctacttacttttcgttaaaatagtgcagtggtggaaatccgtgctcggaatgcacaaaacgcgactgtgtctgcgatgtcgatgagaactctgataaacgacgcaaactctacttaggtataatggaagaacttaggtaccatcaacaatttatggacgggttttttgaggcaatacggacttctgatgatgctaatgtccaccacattatcgatgttgtgcggtcgggatcattgaccagtgagatacagactgcagtgaatcgcattcttacggataatcgttcttcctacaatgacgtccctgaaggaggtccgttaagtgaccggcccaagaggaaggcttctaaatcggctacgtcggattatctcatagcccagctgctggatccaagcgaaattcaaagtgatggcgactcagcccagcaacctgttccgtaccccacgagctatcgcgtgctaccaaggaatatctcgagaagtctgagaatacagaaatgctttgcgaatgaggagcttccagatgatgttcgctttcagatgttttacgacgccggatatgttacgcgctactttggcgctattcatctaaaagaacagtcacctcaactgcaactggaggcatccttgctacataagatggcgttccggcgccatgcttttgatgtgcatcatgtgtgcagtcagtcgctggcgttgctcgaattcggtgtaggaacttcaaagacaagaataagcaggccatggtctcctgagcggcagtcaagtagggagatccggataaatataggtatacactgtcggcctcgttacgacactacttgatgcctaaccaattaaaaattggcatgaagcagactttcggggaatctcagtcataatatataattatccactgcagagatgctttcggagtcggctagcgttcgaatgcttcttcgcacagaaagggcatactcgcatgcaggaagcgattctgatctctgcattttccttgggccaatgctggtagtctttccgatgcgcaacacaatcgcaagcagggtgtatatctgtcgtattttccatgtggctgtcacgactgagaaggactgggaatgattggggacgattgaggacgattggggacgattggggacgattgagataatggctctaaagagcagttcatgcgataaattttaatctagtaggtgttaattagcaatatcgatgataagaagctaataaaagcacaaacggcttcgttcacaccgcgtatttgcgcaaactatcgcgtctatatgcagggatgcaggagagcagtgcttctccgcctaccctattaggttagattgtatttttcctatctgtgctgtagtcaggatacagtcactacgcaaaagtgttagcaccccagattctgccagtaaatattcaccaataaagggctaaggataatagacggaatatcaatttaaggaggcagtataataaattaggaaggcggtagtagaaggggtgttaatacttctgcggagtcactgtaggttaagaatccagacaagtgttccgcttccgaagatccacccccattagttgcccacgcatgctcgaattatgtgtgacttgataatccttgtagaccgttagatacgacacagcacaggactacacaacaattcacagaataacttcgaaaaagatggaatacaatttatgcgatagggcactttgaacattctgatttaacgtgctatgaaatatctggagtctctaatgtgaccctcacataaaatgtagtcaatggtacaaaatgtgcctttgtcgctgaaaggacaccatcggatggttgaaccgcctgaagagttctcaccgaaaccttccaccccagacgcaacttctttctatgccctttgtggattagtttccacttaaaggtagacatttgagtcatgactggccaattagtgaagaacaagttatcataaatacgcctagctacgtgtagagtaaggttctgggtaactaaatgcttccaagggcatcactggccagccaacaacctcaatctccacatcagtctgccacatgtggccgaacccttcatgattcagattgctttcaccaaagccaagagctcgccaaagcttgatgcgaaatatgaaacagtcagtcccaaactcgtcgaggtcataccagcgatcatctgcagagtccgcagttgatgtgtttgtctgcgggtcctccgctacaaagtcaggactagaaatgtcattcgattcgtcagtcatgtcattcgattcgtcagtcatgtcatgcgattcgtccgtcatgtcatccaattcgtcaggcaactcgtctgattcatcatgaacgtcgttatcctctggcaaacttccatacatattctcatccccagtatacaatcccatacaatagatatctgccgtgcatgggagagtctgaagctttgggaatactcttcgccactcggtgacaaaatcttgcatttggtctgactgcattagtacccttggttgatcgaaccagacgcttctgaggcacatgattttcaagttggatagtggacgcgcttgatgcatcagcaaaagagaaaggaacaatcgagcctccggcaagttcaaagaaacgagacgtggacagtaatgcgcgagatcaggaagcattgcaccattcattcgatacctgagccccaacgtaagcaattccacattgggtaatgcacgtaagagacctaggaactggggctgagagaggttttggtcccccatcctggcagatttatcatacacttcaaactttcgtaatagcgggcaacctcgcgcaatcttgagtagtgcttcagcatccgctagggcctcaaaggtcacgtcaacaatctgcaagtgacgacatttcgaaatcattctgattgcctgtccattgtgggcaggagagatatggtgcaaacagattatctgaagtttttcaaatctgggcaaatattctaaccaattttcatgcccccgtctaaggtggagtactttcaaatctggccatgggttttgagccagagatatcgatgcttgacttggatcgcagaaagttgtcctaagtgccagtgtttcgaggctcttctggtactgaaggtatggtaaaacttccccgagacttgattggacgggattgtttagccctcttggttcttcaaattggaagaaatgtaaattgcagtgtttcaggaggacacaaagctcattgaccgtttgatcaaaatcagacttataaattgtgagagccatgacattggcaaatttgttctattatggtggtaagtcatctttcaaagagctaatagggcgtgcaaaccaacatcaagtagggcattggagtgagccatcaaattcttgcagtaaatgttgtcaatagccaagtactccacagtgggggaaagaagaacatcagatatggatgaccaatcttgatctatgatctcgtatggaattataagactctgaaaacctcttccctgtggccgcaagagaagttctgtagattgccgatgacgcagcatgcgaggcttttcaaaggatgcaagtcgagtaggattcgcagcttcatccaacgccggtgtttctggcgcaagtaaaagatgtttgacaaagctaatattccgggcgaagcgggttcgcgacgctacatacaagctattcagtgatccaataccaggtgtacggagctgcatatcattgatggagcccgagtatagtttcttgagagcttctgcactccagacgctattgacacaagcacagttcaggagatctggagccgtgtgaacattgtcgatgacgagtgacatgatttctgggaggaggaaaggattatttacactgctttgaaggcatgcagccatggcgtatccataaaacgaaaaggaacggaacttaaaacgataaatgaaggttctcactcggtttgaaacaagaacgggacgtccccgaagataacatcacggtgtgaatccggcgctaactaaggaatattgatgactaaccttgtcaaagcggggttgcactagcctaggacccagccaaaacctttacgatgtcgacagcataacctcgtgcggagtccgacgcttaactacaccgatccagggtcgtgaacttagtatctagttgaccagggcccaaatattttaatctgtgataaaaaaaggtcgcgagcttaaaaattgtacgtacagtagcatcgccagttcacatatttgttaagatcagtgattggctggttgttttattgttgttggttgacttaatgagtcccctccactactcacccgccagaaccaggcgctttcccttccccgtgcgcatttgctgaaatccgatttacaccgaagccatttacccccctcatcaactttcaaggcgtggaaaaattctagcaaagtgacattcattcaatatctctcttagccatcaatcgatgagcgttattacccctgccaagatctcatcagcaatcccgcccgccataaatggaatcaacttatggcgtttgagatcccattccagaatctgacatacagtatccttgtggagagaatactggcatttaagtcgcctcaatggtatatgttgaattcatcatcgcgatactatcctgggtacgatacttctccccacctttgttacaatgcatctttttctttggtctttgcaacgctcaacaaattcctaggatactgtgtaaagctcaaaagcacctgcgaaacgatgtatttcgtaggggctaggaacaaagtaaaatgcaaggccattatttgatggccccacacatgaagaccccaggcgagacaatgtcctttggagtgaggagctcgggcgtgctctaatcatcgactttcaccgttctaccctgacatgtcgaccggctaggcagcgaccgggggccgcaaaacgacgactatatcaagtggaggcaggagatgcaaagcgtcttcgggtttcgtgataagaaaatctattttctacctgttaaattagcgattttgtgactcaaattctcatggtcacctatatatttcgaggcgaggtgcgctccttattcatgtgcatcaacaccacccgacttattatgtgagccggaccctcgaacttgagaactttttggaatgatatgaccattataagagcatagcagactgtcattcaattctgatattgcgacaaatgcaacagctgactgtataattgagggccgtttaagaggcccactgggagccaatctcaacactgcttttgccagcacaggtccacagaactgatatctctcataaatatggaagttattgcagtccagcattggccgcatgatgtaggatcgaccgaggtcaggcgagtgtggggtattttcgctattggctcgcatcgccgtggtattctttcaagattcacagattgggtgcggagagaccggagaggccaacgatgtcgacagatgggaggtcgaggcattcgcgaacaagcggccgagagtagatctggcacgccaagggctgtgcaatgaaacctctggtggggcctgagatggggcggatgaagcggagcattcaccaacaaggagaacaatttgggagacttcgcaacaagcaagggaggtcagcggaataacagacacccaacgggaaggcctcaccagcagaaagaaagcggtctagatgtctttgtagagttctttggaaaatggagtattgacacacaattatgcgatgcggtggatggctagatcaccccagtatttctactcctaagcaactgaatagcattacagcccacgctggtcagaacgaccagggagtcggatcgatctgcatctccggtaaactgaaaggggcagtgcgtcgggctgaaagcaaatgtgcagtagtcggtgggggccagagtaaaagaaagggggcggcgatgagtgcaagatagagaggtaggaagaatgaaaaagtgagagtaagggaggaggaccagtgaagacgggtctttatgtcaaagagcattgaagggaggttatgtgatggcgtattgaggcactaagcctaaaaaggcaaaactaaccggatagagtaattcacgggtccgccgtttacatgcaaaaaatgcattaattatgaagtcacggggaactggcatgtttgcactgtttatcaaagaatgggcccccaatgggcccccacgatgggccgtgggcccaaaaaaaaagcccaaagcccatcgtgggcccaagaaccgggcccaaagcccagcccattcgtgggttgggctgggttgggctttgggctttgtgggttctgcggaagcctatactatagatctctatactagcagcttattagctaaaaacactattactagtaccttttcaccggattccttgtctctataaaaaggaatcgcttctttctctcctctctaggaaagatttcctaacaattgagtatatcttcgcgaaactacctctatttcttaatcaggatattacctgatattatatgctctactatatagtctattttactccggcctactagaccactctttactcgttctctaggccctagatactttatatattttacccttttgcctgtcttttacctgttaacttaatgatagagtgctatatttttttatattattactagctttataggaagctctttcgaaagagatagatgatctcatgaagggtattggaaggtaagtcctgttattggtgggtcacgtgacctgtctactatttttagatacttgcccatctatagcttctcttcttcttcccttctctctttacacatatatacaattcctgtatagcctcattacgttccagtaagaccttctaagacagtgtcatcatctcgctccatagatgcaatttaatcttcaagtagattgtctaaagctgacacggttctttcaagctgacgacctgcttagcgattgactattgtattatacgtttgttagatcgcttttagagatcatatcgtaagaaatctaacgggatcccttcttttatctattatacgggcgaaaatcacggacgaaaacacctattaagtcttaggatcagactaaatgttaagatatataataccggtccgatattgcccagcttcatgctaccggcgatccttaacgatgccgggctcgggagtccttcagggcttcatatccgctgactcatcgggttctgactaagcggaccctgatcaaacttaattgaaacatttttaattaaaatctctcagggatcttccaaagtgaccgagtagacacagccggaagggatgaaggatccgtcgatttggctcaagctaaacaaccaagtttcacaccaattccaatgaatatctatagatccacattggtctcatttttttcaaaaatgccatgtaacaattcatgaatgtcgtataagaatatataagtgaccggctgaaaattttctggatccattccttgacttcgttctaaagttttaatattggaaaattccgtatctatatatgatgtctgtgtgagccatggtgatgactgtgactccgcttcgcagtgacaaattcaggctctgtactatcatcatcatgcgccaagccgatctcgttgagttgatcggccatctccttgaacggactatcttcctcgaagggatcgtcgctaagtgtgacatctgagtcgaggacagtatttgttagtcatgtctcatcaatcaattggttttgatcaacttacttgtaaccacccagttgtcagggtcattagggtccaaacctctggctgcgatggtagccgggggttcgaattggatcttgcagggcttgttttccagcatatcgaccttaagcgcaccaggggccttcttcttgtaagggtacacgaggcagatgccgttgttggtcagtgaaagttcagggtttccctggaggttgataccacccaaaacatggaggagtcctgtccctgggttcatggaaggattgttcgtggcacctgaggaaaatataccacctactgtcccgaggttgttctgggtgttcgtgtagctgaaaaggttcatggtgtagtatcttgtcggccctgtccatgacgagtccttccagtatttcgatgcggtttggcccgttggctgattaattagtaaacatttgatagatgctgccaggtacaaaaattttgactcacggtgtacttgatgtaagaaagttggccattgatcttagcttgatacttctgctgaccgtccggaacacatgcgacctcctaaaggacatcagattagttttcacgcaacaagtttcaaagagaataagatcagcttacagcgcctgtgcccccctctgctgctgagttgactggacgagtgtcgtgtcagtagatggccttgaatcaagtggatccagagtgcaatgttgacatacagggaaactcatcacaggacatggtcagcgcctggggctgttttccatccttgggccaaagggacctcttcaacttcgtacattccttcgatttctgagtacatgcgtcgacccggttagcatgcgttggatccggctgataggtcaggcgcatccaattgggccaaacatattgcttgcccgagttccggtccaggtatttcttgacattttcgcaaatgcccctgagatcgacgtgaggagtttgtccatttgtgtcagtgttgaggttgttgattctcgttgttgggaaccagtcacagttgtaaaacaacgccggtgggaggtagcaagttggtgcggtgttagcacgcttagcagttgacgaggtgtcttctgtatccaagcaactcaaggtttcgttagtaagttgagtattcttgttggcacattgacaccatccactaaagaaaggtgagccagttgtgtttttgaccagagccgagcttgttgaatcacgcttcctcttttcatccacatcactcgagtaagctagacattttttgtcaacaagtgcgatgggatcttctggagaggcgatctcatatcgatcaccccagtatgccacgtcgccaaggaatctgaggatttatcagttagcactgaccgggataaccaaaagccttcaagtagatataacttacgaggcatctgcttgcagaaataccgaataatcgtagtctgcccagtagcagaattctgcagaagacccgctcgatagacctgtcgacgccgaagcactaacacccaaactgacagtgttctcgactcccgcggtaaaatagccttccattaactttccattcagaacagaaataccgaatttgacctcaggggtaagagtcaaagccaagttgcccgatgccgacgctgaagcttcgaactgaggtgtgacggagaattgattcggggcatccttgccatcctcgtttttgagagaagacgggggaacactggcatcctcaccatctgaatcttgtgggaagaacacttctgctttagggaattccacaacaacaccagcgttaagttcacctgaaaccaccatcgaggcatccattttaccggaaagggcgagctctgggccgatgctgataagtcccttgatggaaagcccagggaatgtcacaccggagataatatcgatcttgtcgctgctggtctggaatgctgcttctcctcgcatggtcagaagaatctctgctgcaggagcaaccgaaaagtatgcataagaagaaatcaacttgggagtgggcaaaatcgcgccttcaaagtagtacgcgtattgcgcattgagacctatatcgagagtagaatcgatgtccagtgacatttgtttgccgctgcacttctcatcccaatggaacaacttgatcgtgtcatagtagttcagaggtaggtatccagagctgtttttgacaattgtggtgactttcttcagccattgcttgaaggcgccaaaccatctcttcctcttctggggtggatcctccgtaatatcctccctaacgacgatgaataatgttagtcgcgactaattttttttgacagtgagtcaccagtcatagcttaccagtagtcaagcaaattcgtatagtcgacccgaaagttgacgtctcccttctcctcctccgaagcggaagccaggtcataatccacagtgagttcatacgcctggtttgtgtcccgcggtaggatattactccgcttctctgaagagtgctgtggaaccaagctgatgacacgagcgtagggtccagatccgtggtaagaaggcatcttgacaatggtgtttgatgcaccaccggagaaaatggtcttacacccggtatcttcatcgaggctcgcacagcgaataatgtaagtctcaacgacgttgtcaaacgtgtcctcgcggaatgtgaagatgtctcgcttcttgcgtggaccgccatctctcttggagttgagacctccatcttccaaaaatgtccactgatccacaagagactcgtcgtatgcatccgtgtcaccatccaccatcacaaatgcgtaagggttctcttgctcgaagtcggatgattcgttgttgtcggtgtcctcgtgcttcaggtaatagctgtagtttttctcatctgggtactcaaatatggcggaggggtcgacgggagggttgacagttgaagtaggtgcatcacagcaaaacttgtacatgcctccttcatggcaatattgggggagactgccatttagtaaagctgagcgttgggtgaggagaactttgtcactagcgcaagactcggtacaagtagtccattcacaattctcgtaaccatcttgattcgtgaggtcccattagcggagttgctgcgaatgaggtgccataacttactgtcaaatgggcagcaaaaggtcgaaacctcacttccagagcagtactcagagtcttcgttgagatctaaaattctgtcagacgttcacattcctcttcaacgtggactcggggggaggtaagggggtgtgatggtgaggtgtgaagtgacttactagtgccgggcttgagagcatattccgggtactcaatatcagttttcatgcattctccgttgcaggcggtccagaaacacgagttcactatagtgtcaagattggggtcggtggcacagcaaagcgatcgactattgaccatgcacggggtagaccctgtccggtcagagtaagagtccttgacaatttcaaattcatttgagccacatgttttctcctttccaccagtacacatgccatcggatgagccgccagtccactggcatgtcggcattgcatctgttgggcaacagatcagacgatattctgagtctgaatcctcatattcggtcgtatcgccagttttgcaaagatgatcatcggggtcaatgatggttccgtaagaggctctgtgaacgtaatccaaaacactgtaacccgctttacatgatccagagttatagtccacgcatccagtgacataacaatcagtaccagtatattgattgtatgcatgtgctaatgccttggcactcagtgagttctcagatcctccttctagcagggaagcggagctgacatctttgttcagcagggcagttaaagcttgccagtcgtatgtatcctgatccaaggcccagatcatgactccgcctaggcattgatcattggcccaatcgaccttctgcttcattgtgacattgttgtcgtacgatacccactggttgtcgtcccaggtgacatacatgactgctgcagtttcctcccagatgggaccctggacatcaacattctcgacgatctccatgatctcattatatgagagaatcccagaagcatctgtacatcgaccaggctgccctcctccagtgaaggggcatccgacgccagtgcatgaagagtccttgagtgtgaaagatcgaccatagaaaccaatgcccaaaacaatctttgatggatcaacattgtttcgccaaagaaggtccatggattgttgaatctctgtcaagtttgtgtgcgctccagtgatattcccaatgtatgggtctgtgccatcccagacaccgtgaagatcgtaggtcatcatgttcgcccagtcggctccgtcttcttgcaaataggcgggcacgtcaaagtggcggagataccagtagctcgatggaatggtgaatgagattccaaggcttgaaccactgtcgtcaaaggttgagcgaacttgcttgatcaacttgccgtagttttccatgtcatccttgctgccaccacgatccgaagcgacaggatactcccagtccaagtcaacaccgtcaaagccgtattgctgcaacgtccgcaataagtctttggcgaatgactttcggccagattcagtagatgccatgtcagaccaatagtgcgccgaatcaccgtcattgaatgaccagccgccaacagacaagaagcacttcaaggacgggttgtcatctttcaaagcaatgaaatcagccaccatgtcattcaagttcgatatcttgtcctcatccatcaggtaaacattccagccatcattccagggtttgaaaagagcaaacgaccaatagatgtgtgtcaggctctgcacggggagattgcttggagaccatgaatcacatgtccgttcagcagaccagctctcataatagccaatgaccttcttgagaacgtcgttcgatttgcaggaaggctgcgttggttgatagcaattgctttggcacttgccgccgtctgtaccggcgttgcaaaactcggatgttgtaccgcagaaaccgaactcggagcagcaaacattcaatgggcaggtcgtgccagcagtggcagcccatttgccgcattctgcagttgcattgcagttgctcacgcatgtagagccacaagatttgtcgggatcatagccacaaagctgtatactttgggtcagcgaggcttaatggataagatagacaggcttaactaacgccattggtttcaccatcgttcacaccacagcatgcaccgttgacacatggacttgtcaagttgcagacatagaactgggccgatgtgaaatttataaagagtgaaagtataataaaagaaagtagaaagaaagaatggcaggacaagaactccgcccgcaaactgtatatcctcatggtgcggctctttcgtccgaaatactgaacaagtcagtaaaagcttgcccaggacgattcaagtcaaaggagaaagagaatgaatgagaaaagtaagaggaactaggatcataaagataacagacggggtccgaaatgaacagccgagactacctaagctcgcaacagtccggcagcctcaagtatccgacgctgatacagttcagtttggagtcccacaagtgtatctactaatctaatctactaatttaatccctcagcgcacgcaatactatttgtggactagacttgcaatttttactaggctagtcgtatctcgtgagaaaccgaatcccttcagagtttggaatggtcaatgtataccctgcataaccccaccggtgtactgtactagtatctcctatgggtgccgaatacatccggaccacctggtggcgccttaagttggccccctggttccaagcctcctgttacactacttcgtagcttcaaatcttgtaagcaatcacttcaaaaattttcatcggcggggcaaggcccggaagtttcagctgtgcagctcgcttagaacaaagcctgcattcaatggtttgtgcaatctctacagaatgcatccgatgtgaaaggtatactgttaattcctacattttacttggcattagagccgcatctgcatcctagcaagccaagctatagccaagaatgtaagcttcagccattgatctgtttgtctacaattcttttctatcgtctaagtccattattcttggcggacccatgtgaaaattttggcccccttggcccccaacatggggccctctaacacgttcaggggatctcggcccctacccgctaagtgggactggcttcgggacttgatgtatagggtaaagcttcacccacttttccacttgaatgggctgtctagtgctcaagccgaaccactttttcctgtacctcgcttagtggatttcgacggatgtctcagatttagcttggtactttgaacttccaatgggcctccccacttctagctccttttgataaggtggtaaattggttggtatgaaggcgtcaatacgaaacaccgaagtttccctgccgaacaagtagtttgagtagccattactccccctcctttgggattgctcatgtcccaggttcaaggaaaatcaattcgcgctctgaattctctttcagtcatagagctatggcactcttgagggcaagtgctgcattggcagtagttctgatgctacagtctcatcatgccgctgcttggggaaattcagacactctctacatttacaactctgatactctggctgatatatcagcttcagaagcatgcgtgaatgccatgtccagcaatgtttcatgctatgccggcttgagccaggcagtcacccagacgacatcatggtcagccaatgcactgtcggaaatgtgtaccagcggttgctcttccgctttgtcaagctatgtctcctctgtggacgaagcctgcggcacaagtacgcagtacaacatctccggtatctcacaaactgcctcggatagaggcaaagaaatgaaatggcgttacgatgcaacctgcttgactgattcggcttcgggcacctattgcaacaccctattccaaaatgcaatttcgaatggcacaacaaacatcaaatgcagcgcatgctatttggagtatttgtcaaccctagtgaattccaaatggggtcaggatattttgctcagtccgtcggccttaacgagtcaagtatcttcttgctcgaccagcggatactctgtgacttatacaccaacctcgactgcctcttccacggcctctgcctcggccactgttgccgctagtcgctgcaacacgactgaccccgatcaaactgtttacaaggttgaatccggagatacctgtctttctatctcagcagctcaaaatgtctcaacctcagccttgataaacttgaacagccttgatacggggtgtacgcatatagttgctggggcagagatttgccttcccgatgtttgtgagatctatcgcgttcaggagacggataccattgacaaaatcgttgcgagcctatcgcgtcaagtctctgtgcctcagtttgttgcatggaatgccaatctcaactcagcgcaaagctcgcagaatctgacggctgtttcggggaagtacatctgcgtcagtcctccgggtactctcacactccccgataccctggctcttaggcccgcaagcaccgctgtgtatgttgtctgctattttgtttcgctcggttgttcggaaagtgaaaatgctaatcaaatatacaggtctcttcctaccgacgcagtcactagctccaacaccgactgtggtcactggtatcaggtccaagatggtgatacctgtgaatccgtgtgcgacaaattcagcatctctcaatataatttcaatttcttaaatccccaggccgcattgaatgcaacctccagttgcggcagcctctggaaagggaacagctacgtacgtctctctacacgagaaaataaccaagacatatcgttcttttcaggctaacccatccactccacagtgcgttcaagcagtgggtaacatcaacacctatacaagctacatatccaacaccacaagaacacgcacatcacttgctagcaccatgaatctcaacgcaacccgaacagcaaaccatagcaccaccaatctgttctggtcattcccttccgacctaaccacggcctcaacctggacccctgattcagcatacctcgcatctctcgcgacctacactctctgcgaccaggtcaactcagtgtacaacatcaccgatgacgatctaacagacgagatgtaccacgatgaagtctggctaagtgaatacgagcgcgtgtgctatcctcccgtgaacggttctttcccgaccaccgggttcaacttcagcattacattgaccgatgatccaagtatgggaagctcgacggtattcacttctagccaaacagctagccctcacgcatcatctacggtcactacggcgacctctaccacagttgcgactcctacgagtacgatttcggagaacggtctctgtggcccgtctaattcggactggacttgtttgggatctcaatttggtgactgctgtagtaactacggttattgtggtagttcgtcggagtattgttccagcgccaattgtaatgctaagtatggctcgtgtggttgatcttggtttgggggtgggacactcaatgccctagagttctaaagttcactgtcggacaaaattcggctatggtcttcaaggcatgtcaaatgtttatatatgccatattttcttctagttttaattactggaatatagaactgggatttaccagctggctgttaactggcacatagtagtgcatggaaacctggaatttatgaatatcaaactttcgcttacatttcaatgattttggcacaaatttacaactttacaaccagaattttgaaagcaagcggctaggccggaaaagacgctacttagtgcacaccaagtttgtgatcgatccacttcaacgaaaaccctttaagccaaagacccactccaggggtgtatatccgagctcgcaaccacttaatctcccctatcaaagcttagtcgtaaagattccaaggtcgcataatacaggtttagtgtgtttgagatgagtttgtacaggaacttttgaaaatataactagatttgatgccttagtgcaaacttggggcgggcatgtatcaaactccgttaaatacattcccgccccccacgttcctcactaaacttcttttcaacccccggaactaccaccattcgatcatgtccttaacaagatcacatagccagtggcctagaggcatcccctctttcattcgccgacatgaggaacccgtggcccggaagaattttgatgccgcctctcgtgcatggaggcattttgttcgtgagcagtgggtcggtggcgacggcgcggatcaacagaaacgagcgttgatcgaacgctgggcaacagcagaccaacaattccgcgatgtatgtcttttggataagaatttttatttttcactgacaccatgacagagctatcaatcacgagccccagaggacgagcctagtttttttgaaggtcctgaacttgcggtatgaaacaattaaatatatcctactacctgacttatcctaatccaagtataggataaaactttcggagccaatgacgttcaaagttcctgcatggtctacttctacaccaccgaattaacccccgagaaagaagccctgctcgccaagtgtatcctgggattattcccatgggaagacggctgggactttctagcagacgaaatgatagtatttgttccccctgaagacaataaggggaatgttctcgagacatttaaattccatcaaagtgtcgcgcgacccaacttcctcgatatgcacatggcgcttgatggaactgtacttttcagagactgctcccccaagcttattatcgatgaccggacccttgagaccggactaggtctctgggttgattttacaaccaacggtatctacgagatagcccgtcggggtcaaattatgatggaggaattcgcctacttttatcgggaaatcggtccgggaaatcgagtcccaatagaccaggcgctcaattacattgaggaccgggaaatttacatagaccgcgacgaagatgcagatccaagagagattttggaggatgaaccgtgagtctgtccattcttggttacgagatggtttatgttaattggtgcttagagtcgatatgcgacggccgcttgtggaaatctacaaagggaatgaagtcgatctggtggatgactatgcgccaggatttcgcgaggcggaggagcagggtgacggtttagcgatcggatttgatttggaaaggatacttgcgaacgatggaaatcccctgattgtcagagatcatggaagtgaccattagctagactttaccatgtactcctgaagtctcgttggttatttatatgggagatacggagtacataactggcaaccaccccttacctccggcagggatggagatctctaccgaatataccttgcccacggagcctccccaaagaatcaataattgggcacttgctgcaggtacccgtggactacagctacagtacggggtacggagtacattctcataccccggagcgattgataacatactaggtactatttatattgtaatatttcagctttttataggtagctgtaaactatttattatatttaaggtatatcatagtctgtttgttaggctggtaaagcttctgatattgaaggtccaagaaatgacgatattaatgataaggagaggaaggaggaagaagaagaagaagctatgaaagaagtaagctaaacagcaaggcaaacaaaacaagcaaagtgagcaaagcgagcaaagcaagcaaacagggcgcggggcagcaagcaagtaaacaaacgaatatataatgcttatagagcatgatactaccccctaataaagtaaaggtattagtcccttgatatcaaaataaccaaatcaattaatgatagtatgaattatcagaatcactcccttccaaatcaaccaatttagggtcaggaacaatagtagcattagtagtagtggcactaagagagatatctattacgtcagatctaccaccagagttactagttttactattttaactataggatataaagacgagatagaacttaatatttttaatactttattaggtaaaaagactatatatattctttagtatattctatatcgattataactataaagagatagcttttaataacgataaatagcgctagatcgactaacgtattcggtaagcgagctgcgcgcgcaaccgagctgcgcagcccaaaacacatagtaaatgcaagatattccacatttatatcttaacaaccatatgttcatcctatctccccgtttgtcgatagttattgataagacttcttagtactatatatcaatttcaaagagagtagaatactatcttaccatgatttcaaatattaccgaaaattacgtccctaaaagctagaaatatatatatcgtagttataaagccatttattttcctaaagttccctagatatactagatatcatatatatagtactatgctataaagacaagtccctatgagccactgttgttgagatatcaagttgtaatatatcgtatttactatgtgttttgggctgcgcagctcggttgcgcgcgcagctcacttaccgaatacgttagtcgatctagcgctatttatcgttattaaaagctatctctttatagttataatcgatatagaatatttatcttctttatcttataaagctattctataattatatacttactcttttaaagactcgagatataactatatatcttattttctagatctataatatattatttaagtatctagagaagtctattaattagctttaataaaagtatatactatagaaataataaatactttcctctcttaaggctagccgattaaagcttaataagtattatttataaataaattataagtatagttatatttatataattagtactatattagcgctagatagtcgattctaattctttctaaccgataattagataaaagaatagtataagatatatcgagctttattctaagatactcttaccccttactaagatcgttaagtaactagttaaggcctattagcctcttcttttagattaagactaaatatagttcttaataatctactttacgtaaagaaacctaaagcgaagccggttagggataagataacctaatatcttaatagtagtaagttaatcttattctaataattacttattacagagtacacaaagccgccctcaatgcttatattgaaacagatggctacggaggacgttgtatacagcgaaaggtcgacaggcgcgaaccaagaaatatcccgacagcatagcctctctcattggcgtttcttcggtcttccagaccgagagctggccttgtggcgtaatttggttgaatagtgaacttgaagggatgacatgtttcgacctgggaagtgagtcgtaatctcagactatgacattgcctctttttccttcagccgcacgagcagcgcattctcgtccgacgtgtatgtgtgtttccctgggataaccgccgtgtgcgctcgagacagcatcgggctaggatcgggtacgaaagtaaagaaatatgccggtttcagaccagtattagattcgaccgtgaggatagcactcccgcgtataccctggatagcaccagagcaatgagatgaaataggaacggaagattccgaagggtcgaaaagtggcctgattgaaggtctccttttcttcctcttttgacacggctgtgctgtgtcataggtggtgttcccgtcttggtggatgctggtacctcgacctgagcggagtcgcttcttgcatactgccgcagcggcccttgtgcttgtcctggcggctccttgtttccaagacgttggcggtataaccacagctatcgacgggtagcgcatcgggggtttggaactcattgtcgttcgagctcgagaacatgttgatgtagagcgatccggaggcggagaggacgggctagatgtggctgacgtgtcttcagcagtgctgggatcttcagcccgccccgaagccttgtttgcccttgagcatggatcttcacctaggttagatgtctgactcggctccgaatcactttcgtagaccccactatctgagggctccatggtagataacttccgcttggctaattcttgccgaaaatcacccaccacagataggttgctagagacacagttcgcttattcgggtacaggcacggatggggtcacacagggtatgcaagagagttgagaagtctccatttctttggtatcaggaacagcgtctacaataaaaaaaagtcagacaatgagaggatgatggccgactttcaatatattgtgccaaattacccggtagaacatctcctcgcatatcaggaggaatagtatctaggtaatttggccctacaggacatagaattgttctcgcggagtctgtcgatagcactggctctaagaaagccagcgcggaacttccacgatccaacagaatatcacaggcagctggtatatctgttgtcactgggggtccgacatctttcgtcatttcaggcggagtgggtccgtagacatgattgatctcgaagtcaaacatgttccactcataagttgtaccggtcagtggcagtgactgtcctaggggtacctcacacggtcctagacagaagccgaacccagtaggaaaagactgctagaggtatcgtggctcatgagctggggcgtggttagggggcacgctttttgcactggtagaaagcggcgggcgacttgggccatggtagaactcgatttgatcaagatccaccctcatttcccagaaagtggtaagacacagcctagacacagcggaggtagaaaccaacagagaatgaagcaagcttaaataagagtacagcggtcactgggctagtgtatccacatccgttctaaatgatatccaaatcccttgatggatcaaagcttcaagactttcctagtcgataaatatgcgtatttagataattggaagcaccaattacaaaggcggttcaaattgcttgtttgattgggctttaggagcggggaaactagttgtacatgttatatttatgaaagcttctagctctcaatcaatgcatggaggatttgatttccagcgagaaaatgacaggcatggtttttccatcctaaagtttgttatttccagtagtgttaaggtatccccaatagactcctacgttattgtgcacactaaagataaagatcgcttccctaccatatacccatttatgatattatcatgccaaaaaacgccagatccagtagtgatataccaaagggaaagagaaatcgttggtgtctatggcaggggtagcccaagagcttgcaaaggtaagcaggagacagtcccatgcactctttctgcatggttcaggagtgccttttttgattctagatcttctccgcaaatattacacttgcagtgcatatcattcgggaacagcttgatatgcctattgacaaagtatcgattgagagaaccagggttcttatacattctcagacgctcattttcgggcagcccagaattaccaagacagataaagcagatcgttggtcgagacttttcagttttaacgcagacagaagcgatagcttgagaaaaagtatcgtctctattttctggaagagcagaattctgcctcttaggcatgggggcagcagcggctatgttacgaccccgagggtcacttgcacaactggcccgtatgggccgacgtacttgctaagtactcaaaatacctatagtagaagctgggtattatagggagatatacccctacctaccggctaagaaaactaaatataggatttataaacccctaccgagataggggctatacctactaaaagagctgctcctatagaagagagggctgcctaaccaatagaatcctccgataaggatattagagaaaataaaagaaggcttatagctaaatagcgagaccttaaggccctcgaaaaacagcttataattattaactagaaagccgaactcttactatacctttataactagaaccttatagctattgccttagaggaagaattaagtatactatacctactactacttaagggagatattacctaagtactagaatccctaaaccctatattaaggatactagtaataccttaaccttccctaatagtagtaggggactataataataatataggtatagtataaagtagtaaaacctcctaagttaaggaactataaagtctatctaatatactagtattctatagtaaaactatagataaataggatatatttaaggtaaaataagaagtattttaagtaagatacctataatagtttaccttagataaagtaagggttatataggtaatagaattcctcttaaataaggttacctagggttagatataatactaaaagaataatcctataaagtagattatataggatatattcgaaacttaggccttaacctaagttatagacctagtatagttatagtataaagtaaaagccgattaatagtaagctatatagaagctggaatagagtatatattaatatacctaatacctaatagggatctataaccacttacactctatactattagattaggtatatatcgactgcctagagataggtattttaagagagatctaaaccgaagcctaatagtaggacctacctaaaataaagatctataataattaggtagcctatcttagctttatagagagctaaatacctttatatactataaagctataggttaagcgatacctatataggtagaataggaatatagacttaaaggataatagtaagaagttattagactaaggctaggaactatctaccttataggatagctaaaaggagtagttattatcctctaataagaggaaataaggctaaggggtaaaattagataactagataaaggacttatattacttatataaggaagctagatatattataagaatttacctaaaagctaagtagctttagaagaataacttaaaggagctaaaaaaatagataaccctatactataggctataatagtactaggaataacccttagagagggttagtagaagggctaaagtatattagtatataatatacttatcttagatatttataagggtatcctaatagggattactagaattctaattaatagtagggctacttagacctttattagctaaagataggcaaaggagaatctagaagatataaaagggataccctatctagtaaaagtaattaataggtataaaatccacttatatagtagctaagagattactttctagcttatagatagtactagaagatatagtattataaagatatattataaggctattaatatattaggatataatatagtcttagggatagactaactctatatagtaaatctaaatattaactagagtactagctattagttatactataagggtaccttactagaaatagagatagtcttcttaaaagagtttaagaaggaactgtatctatataatatcttttatatactttatattagaccgctagatctattagaagaaggcaaatagttaggaactatatagatagataaccccttactataagtatatagagactttatagatatctttaataaagctctagctttaatcctactagaatatactatatataattatactattaacctaaagttaggaaaggtacctctatttaggttactatacttactatcgaatatagagttagaagtcctatatatctatattaataagaaccttaagagggactagatctaatatttaaagagccttataaaggtacctattctttttatactaaagaaggatagtaagcttcggctatatatagacttctatagattaaatataattattattaagaaccactacctcttacctttaattagtaaatccctattaagacttattagtataaaggtctatattaagctagaccttagagatatatactataggatctatattaagaaaggtaataaatagaaaatagtatttagaattaattatactataagggtaccctactagaaatagagatagtctccctaaaagagtttaagaaagaactatatttatatagtatcttttatatactttatattagactactagatctattagaagaagataaacggttaggaactatatagatagataactccctactataagtatatagagactttatagatatctttaataaagctttagctttaatcctactagaatatattatatataattatattatcgatctagaactaggaaaggtacccctatttaggttactatatttactattaaatatagaattagaagtcctatatacctatattaataagaaccttaagagggactagatctaatatttaaagagccctataaggatacctattctttttatattaaagaaggatagtaaactttagctatatatagacttctatagattaaatataattactattaagaactactattccttacccttaattaataaatccctattaagacttactagtataaaggtctatactaaactagaccttagagatatatactataggatctatattaagaaaggtaataaatagaaaacggtatttagaacctactatagatatttcgagtattatataatactatttaggcttataaatatacctataaccttctaagcttatataaataaggctcttataagattattagatatcttcctagtaatctacttaaataatatcttaatcttttcctaggataaggaatcttatatagaatatatataaatagtattagaatagctctactagtttaaactctatataaaggctttaaaatataccttctatacttcttaagtagagttccttagatttattatctctaataatagtatttctatagaccctacctaagtagaagtaattattacttagctaaagctagagtatatcttcgatatatagtaatttataggcttcgcgaacttttactataaatttattaaattatacttaaagattatagggctacttaatatattagtctaaggcctaaatatatagaagaaggggaagaataaaaagaagctaggcttctactttaataaaactataaggaaggctttttaagagattaaagagattttctaaaaagcccctttccttatatactttaactccctactaagaaccttagtagaatctaatatattaggtaaagtaattagagtaatctacttatagctataaaaagagagtagtacttagaaactaattatattcttcttatataagataagnnnnnnnnnnnnnnnnnnnnnnnnnnnnnnnnnnnnnnnnnnnnnnnnnnnnnnnnnnnnnnnnnnnnnnnnnnnnnnnnnnnnnnnnnnnnnnnnnnnnnnnnnnnnnnnnnnnnnnnnnnnnnnnnnnnnnnnnnnnnnnnnnnnnnnnnnnnnnnnnnnnnnnnnnnnnnnnnnnnnnnnnnnnnnnnnnnnnnnnnnnnnnnnnnnnnnnnnnnnnnnnnnnnnnnnnnnnnnnnnnnnnnnnnnnnnnnnnnnnnnnnnnnnnnnnnnnnnnnnnnnnnnnnnnnnnnnnnnnnnnnnnnnnnnnnnnnnnnnnnnnnnnnnnnnnnnnnnnnnnnnnnnnnnnnnnnnnnnnnnnnnnnnnnnnnnnnnnnnnnnnnnnnnnnnnnnnnnnnnnnnnnnnnnnnnnnnnnnnnnnnnnnnnnnnnnnnnnnnnnnnnnnnnnnnnnnnnnnnnnnnnnnnnnnnnnnnnnnnnnnnnnnnnnnnnnnnnnnnnnnnnnnnnnnnnnnnnnnnnnnnnnnnnnnnnnnnnnnnnnnnnnnnnnnnnnnnnnnnnnnnnnnnnnnnnnnnnnnnnnnnnnnnnnnnnnnnnnnnnnnnnnnnnnnnnnnnnnnnnnnnnnnnnnnnnnnnnnnnnnnnnnnnnnnnnnnnnnnnnnnnnnnnnnnnnnnnnnnnnnnnnnnnnnnnnnnnnnnnnnnnnnnnnnnnnnnnnnnnnnnnnnnnnnnnnnnnnnnnnnnnnnnnnnnnnnnnnnnnnnnnnnnnnnnnnnnnnnnnnnnnnnnnnnnnnnnnnnnnnnnnnnnnnnnnnnnnnnnnnnnnnnnnnnnnnnnnnnnnnnnnnnnnnnnnnnnnnnnnnnnnnnnnnnnnnnnnnnnnnnnnnnnnnnnnnnnnnnnnnnnnnnnnnnnnnnnnnnnnnnnnnnnnnnnnnnnnnnnnnnnnnnnnnnnnnnnnnnnnnnnnnnnnnnnnnnnnnnnnnnnnnnnnnnnnnnnnnnnnnnnnnnnnnnnnnnnnnnnnnnnnnnnnnnnnnnnnnnnnnnnnnnnnnnnnnnnnnnnnnnnnnnnnnnnnnnnnnnnnnnnnnnnnnnnnnnnnnnnnnnnnnnnnnnnnnnnnnnnnnnnnnnnnnnnnnnnnnnnnnnnnnnnnnnnnnnnnnnnnnnnnnnnnnnnnnnnnnnnnnnnnnnnnnnnnnnnnnnnnnnnnnnnnnnnnnnnnnnnnnnnnnnnnnnnnnnnnnnnnnnnnnnnnnnnnnnnnnnnnnnnnnnnnnnnnnnnnnnnnnnnnnnnnnnnnnnnnnnnnnnnnnnnnnnnnnnnnnnnnnnnnnnnnnnnnnnnnnnnnnnnnnnnnnnnnnnnnnnnnnnnnnnnnnnnnnnnnnnnnnnnnnnnnnnnnnnnnnnnnnnnnnnnnnnnnnnnnnnnnnnnnnnnnnnnnnnnnnnnnnnnnnnnnnnnnnnnnnnnnnnnnnnnnnnnnnnnnnnnnnnnnnnnnnnnnnnnnnnnnnnnnnnnnnnnnnnnnnnnnnnnnnnnnnnnnnnnnnnnnnnnnnnnnnnnnnnnnnnnnnnnnnnnnnnnnnnnnnnnnnnnnnnnnnnnnnnnnnnnnnnnnnnnnnnnnnnnnnnnnnnnnnnnnnnnnnnnnnnnnnnnnnnnnnnnnnnnnnnnnnnnnnnnnnnnnnnnnnnnnnnnnnnnnnnnnnnnnnnnnnnnnnnnnnnnnnnnnnnnnnnnnnnnnnnnnnnnnnnnnnnnnnnnnnnnnnnnnnnnnnnnnnnnnnnnnnnnnnnnnnnnnnnnnnnnnnnnnnnnnnnnnnnnnnnnnnnnnnnnnnnnnnnnnnnnnnnnnnnnnnnnnnnnnnnnnnnnnnnnnnnnnnnnnnnnnnnnnnnnnnnnnnnnnnnnnnnnnnnnnnnnnnnnnnnnnnnnnnnnnnnnnnnnnnnnnnnnnnnnnnnnnnnnnnnnnnnnnnnnnnnnnnnnnnnnnnnnnnnnnnnnnnnnnnnnnnnnnnnnnnnnnnnnnnnnnnnnnnnnnnnnnnnnnnnnnnnnnnnnnnnnnnnnnnnnnnnnnnnnnnnnnnnnnnnnnnnnnnnnnnnnnnnnnnnnnnnnnnnnnnnnnnnnnnnnnnnnnnnnnnnnnnnnnnnnnnnnnnnnnnnnnnnnnnnnnnnnnnnnnnnnnnnnnnnnnnnnnnnnnnnnnnnnnnnnnnnnnnnnnnnnnnnnnnnnnnnnnnnnnnnnnnnnnnnnnnnnnnnnnnnnnnnnnnnnnnnnnnnnnnnnnnnnnnnnnnnnnnnnnnnnnnnnnnnnnnnnnnnnnnnnnnnnnnnnnnnnnnnnnnnnnnnnnnnnnnnnnnnnnnnnnnnnnnnnnnnnnnnnnnnnnnnnnnnnnnnnnnnnnnnnnnnnnnnnnnnnnnnnnnnnnnnnnnnnnnnnnnnnnnnnnnnnnnnnnnnnnnnnnnnnnnnnnnnnnnnnnnnnnnnnnnnnnnnnnnnnnnnnnnnnnnnnnnnnnnnnnnnnnnnnnnnnnnnnnnnnnnnnnnnnnnnnnnnnnnnnnnnnnnnnnnnnnnnnnnnnnnnnnnnnnnnnnnnnnnnnnnnnnnnnnnnnnnnnnnnnnnnnnnnnnnnnnnnnnnnnnnnnnnnnnnnnnnnnnnnnnnnnnnnnnnnnnnnnnnnnnnnnnnnnnnnnnnnnnnnnnnnnnnnnnnnnnnnnnnnnnnnnnnnnnnnnnnnnnnnnnnnnnnnnnnnnnnnnnnnnnnnnnnnnnnnnnnnnnnnnnnnnnnnnnnnnnnnnnnnnnnnnnnnnnnnnnnnnnnnnnnnnnnnnnnnnnnnnnnnnnnnnnnnnnnnnnnnnnnnnnnnnnnnnnnnnnnnnnnnnnnnnnnnnnnnnnnnnnnnnnnnnnnnnnnnnnnnnnnnnnnnnnnnnnnnnnnnnnnnnnnnnnnnnnnnnnnnnnnnnnnnnnnnnnnnnnnnnnnnnnnnnnnnnnnnnnnnnnnnnnnnnnnnnnnnnnnnnnnnnnnnnnnnnnnnnnnnnnnnnnnnnnnnnnnnnnnnnnnnnnnnnnnnnnnnnnnnnnnnnnnnnnnnnnnnnnnnnnnnnnnnnnnnnnnnnnnnnnnnnnnnnnnnnnnnnnnnnnnnnnnnnnnnnnnnnnnnnnnnnnnnnnnnnnnnnnnnnnnnnnnnnnnnnnnnnnnnnnnnnnnnnnnnnnnnnnnnnnnnnnnnnnnnnnnnnnnnnnnnnnnnnnnnnnnnnnnnnnnnnnnnnnnnnnnnnnnnnnnnnnnnnnnnnnnnnnnnnnnnnnnnnnnnnnnnnnnnnnnnnnnnnnnnnnnnnnnnnnnnnnnnnnnnnnnnnnnnnnnnnnnnnnnnnnnnnnnnnnnnnnnnnnnnnnnnnnnnnnnnnnnnnnnnnnnnnnnnnnnnnnnnnnnnnnnnnnnnnnnnnnnnnnnnnnnnnnnnnnnnnnnnnnnnnnnnnnnnnnnnnnnnnnnnnnnnnnnnnnnnnnnnnnnnnnnnnnnnnnnnnnnnnnnnnnnnnnnnnnnnnnnnnnnnnnnnnnnnnnnnnnnnnnnnnnnnnnnnnnnnnnnnnnnnnnnnnnnnnnnnnnnnnnnnnnnnnnnnnnnnnnnnnnnnnnnnnnnnnnnnnnnnnnnnnnnnnnnnnnnnnnnnnnnnnnnnnnnnnnnnnnnnnnnnnnnnnnnnnnnnnnnnnnnnnnnnnnnnnnnnnnnnnnnnnnnnnnnnnnnnnnnnnnnnnnnnnnnnnnnnnnnnnnnnnnnnnnnnnnnnnnnnnnnnnnnnnnnnnnnnnnnnnnnnnnnnnnnnnnnnnnnnnnnnnnnnnnnnnnnnnnnnnnnnnnnnnnnnnnnnnnnnnnnnnnnnnnnnnnnnnnnnnnnnnnnnnnnnnnnnnnnnnnnnnnnnnnnnnnnnnnnnnnnnnnnnnnnnnnnnnnnnnnnnnnnnnnnnnnnnnnnnnnnnnnnnnnnnnnnnnnnnnnnnnnnnnnnnnnnnnnnnnnnnnnnnnnnnnnnnnnnnnnnnnnnnnnnnnnnnnnnnnnnnnnnnnnnnnnnnnnnnnnnnnnnnnnnnnnnnnnnnnnnnnnnnnnnnnnnnnnnnnnnnnnnnnnnnnnnnnnnnnnnnnnnnnnnnnnnnnnnnnnnnnnnnnnnnnnnnnnnnnnnnnnnnnnnnnnnnnnnnnnnnnnnnnnnnnnnnnnnnnnnnnnnnnnnnnnnnnnnnnnnnnnnnnnnnnnnnnnnnnnnnnnnnnnnnnnnnnnnnnnnnnnnnnnnnnnnnnnnnnnnnnnnnnnnnnnnnnnnnnnnnnnnnnnnnnnnnnnnnnnnnnnnnnnnnnnnnnnnnnnnnnnnnnnnnnnnnnnnnnnnnnnnnnnnnnnnnnnnnnnnnnnnnnnnnnnnnnnnnnnnnnnnnnnnnnnnnnnnnnnnnnnnnnnnnnnnnnnnnnnnnnnnnnnnnnnnnnnnnnnnnnnnnnnnnnnnnnnnnnnnnnnnnnnnnnnnnnnnnnnnnnnnnnnnnnnnnnnnnnnnnnnnnnnnnnnnnnnnnnnnnnnnnnnnnnnnnnnnnnnnnnnnnnnnnnnnnnnnnnnnnnnnnnnnnnnnnnnnnnnnnnnnnnnnnnnnnnnnnnnnnnnnnnnnnnnnnnnnnnnnnnnnnnnnnnnnnnnnnnnnnnnnnnnnnnnnnnnnnnnnnnnnnnnnnnnnnnnnnnnnnnnnnnnnnnnnnnnnnnnnnnnnnnnnnnnnnnnnnnnnnnnnnnnnnnnnnnnnnnnnnnnnnnnnnnnnnnnnnnnnnnnnnnnnnnnnnnnnnnnnnnnnnnnnnnnnnnnnnnnnnnnnnnnnnnnnnnnnnnnnnnnnnnnnnnnnnnnnnnnnnnnnnnnnnnnnnnnnnnnnnnnnnnnnnnnnnnnnnnnnnnnnnnnnnnnnnnnnnnnnnnnnnnnnnnnnnnnnnnnnnnnnnnnnnnnnnnnnnnnnnnnnnnnnnnnnnnnnnnnnnnnnnnnnnnnnnnnnnnnnnnnnnnnnnnnnnnnnnnnnnnnnnnnnnnnnnnnnnnnnnnnnnnnnnnnnnnnnnnnnnnnnnnnnnnnnnnnnnnnnnnnnnnnnnnnnnnnnnnnnnnnnnnnnnnnnnnnnnnnnnnnnnnnnnnnnnnnnnnnnnnnnnnnnnnnnnnnnnnnnnnnnnnnnnnnnnnnnnnnnnnnnnnnnnnnnnnnnnnnnnnnnnnnnnnnnnnnnnnnnnnnnnnnnnnnnnnnnnnnnnnnnnnnnnnnnnnnnnnnnnnnnnnnnnnnnnnnnnnnnnnnnnnnnnnnnnnnnnnnnnnnnnnnnnnnnnnnnnnnnnnnnnnnnnnnnnnnnnnnnnnnnnnnnnnnnnnnnnnnnnnnnnnnnnnnnnnnnnnnnnnnnnnnnnnnnnnnnnnnnnnnnnnnnnnnnnnnnnnnnnnnnnnnnnnnnnnnnnnnnnnnnnnnnnnnnnnnnnnnnnnnnnnnnnnnnnnnnnnnnnnnnnnnnnnnnnnnnnnnnnnnnnnnnnnnnnnnnnnnnnnnnnnnnnnnnnnnnnnnnnnnnnnnnnnnnnnnnnnnnnnnnnnnnnnnnnnnnnnnnnnnnnnnnnnnnnnnnnnnnnnnnnnnnnnnnnnnnnnnnnnnnnnnnnnnnnnnnnnnnnnnnnnnnnnnnnnnnnnnnnnnnnnnnnnnnnnnnnnnnnnnnnnnnnnnnnnnnnnnnnnnnnnnnnnnnnnnnnnnnnnnnnnnnnnnnnnnnnnnnnnnnnnnnnnnnnnnnnnnnnnnnnnnnnnnnnnnnnnnnnnnnnnnnnnnnnnnnnnnnnnnnnnnnnnnnnnnnnnnnnnnnnnnnnnnnnnnnnnnnnnnnnnnnnnnnnnnnnnnnnnnnnnnnnnnnnnnnnnnnnnnnnnnnnnnnnnnnnnnnnnnnnnnnnnnnnnnnnnnnnnnnnnnnnnnnnnnnnnnnnnnnnnnnnnnnnnnnnnnnnnnnnnnnnnnnnnnnnnnnnnnnnnnnnnnnnnnnnnnnnnnnnnnnnnnnnnnnnnnnnnnnnnnnnnnnnnnnnnnnnnnnnnnnnnnnnnnnnnnnnnnnnnnnnnnnnnnnnnnnnnnnnnnnnnnnnnnnnnnnnnnnnnnnnnnnnnnnnnnnnnnnnnnnnnnnnnnnnnnnnnnnnnnnnnnnnnnnnnnnnnnnnnnnnnnnnnnnnnnnnnnnnnnnnnnnnnnnnnnnnnnnnnnnnnnnnnnnnnnnnnnnnnnnnnnnnnnnnnnnnnnnnnnnnnnnnnnnnnnnnnnnnnnnnnnnnnnnnnnnnnnnnnnnnnnnnnnnnnnnnnnnnnnnnnnnnnnnnnnnnnnnnnnnnnnnnnnnnnnnnnnnnnnnnnnnnnnnnnnnnnnnnnnnnnnnnnnnnnnnnnnnnnnnnnnnnnnnnnnnnnnnnnnnnnnnnnnnnnnnnnnnnnnnnnnnnnnnnnnnnnnnnnnnnnnnnnnnnnnnnnnnnnnnnnnnnnnnnnnnnnnnnnnnnnnnnnnnnnnnnnnnnnnnnnnnnnnnnnnnnnnnnnnnnnnnnnnnnnnnnnnnnnnnnnnnnnnnnnnnnnnnnnnnnnnnnnnnnnnnnnnnnnnnnnnnnnnnnnnnnnnnnnnnnnnnnnnnnnnnnnnnnnnnnnnnnnnnnnnnnnnnnnnnnnnnnnnnnnnnnnnnnnnnnnnnnnnnnnnnnnnnnnnnnnnnnnnnnnnnnnnnnnnnnnnnnnnnnnnnnnnnnnnnnnnnnnnnnnnnnnnnnnnnnnnnnnnnnnnnnnnnnnnnnnnnnnnnnnnnnnnnnnnnnnnnnnnnnnnnnnnnnnnnnnnnnnnnnnnnnnnnnnnnnnnnnnnnnnnnnnnnnnnnnnnnnnnnnnnnnnnnnnnnnnnnnnnnnnnnnnnnnnnnnnnnnnnnnnnnnnnnnnnnnnnnnnnnnnnnnnnnnnnnnnnnnnnnnnnnnnnnnnnnnnnnnnnnnnnnnnnnnnnnnnnnnnnnnnnnnnnnnnnnnnnnnnnnnnnnnnnnnnnnnnnnnnnnnnnnnnnnnnnnnnnnnnnnnnnnnnnnnnnnnnnnnnnnnnnnnnnnnnnnnnnnnnnnnnnnnnnnnnnnnnnnnnnnnnnnnnnnnnnnnnnnnnnnnnnnnnnnnnnnnnnnnnnnnnnnnnnnnnnnnnnnnnnnnnnnnnnnnnnnnnnnnnnnnnnnnnnnnnnnnnnnnnnnnnnnnnnnnnnnnnnnnnnnnnnnnnnnnnnnnnnnnnnnnnnnnnnnnnnnnnnnnnnnnnnnnnnnnnnnnnnnnnnnnnnnnnnnnnnnnnnnnnnnnnnnnnnnnnnnnnnnnnnnnnnnnnnnnnnnnnnnnnnnnnnnnnnnnnnnnnnnnnnnnnnnnnnnnnnnnnnnnnnnnnnnnnnnnnnnnnnnnnnnnnnnnnnnnnnnnnnnnnnnnnnnnnnnnnnnnnnnnnnnnnnnnnnnnnnnnnnnnnnnnnnnnnnnnnnnnnnnnnnnnnnnnnnnnnnnnnnnnnnnnnnnnnnnnnnnnnnnnnnnnnnnnnnnnnnnnnnnnnnnnnnnnnnnnnnnnnnnnnnnnnnnnnnnnnnnnnnnnnnnnnnnnnnnnnnnnnnnnnnnnnnnnnnnnnnnnnnnnnnnnnnnnnnnnnnnnnnnnnnnnnnnnnnnnnnnnnnnnnnnnnnnnnnnnnnnnnnnnnnnnnnnnnnnnnnnnnnnnnnnnnnnnnnnnnnnnnnnnnnnnnnnnnnnnnnnnnnnnnnnnnnnnnnnnnnnnnnnnnnnnnnnnnnnnnnnnnnnnnnnnnnnnnnnnnnnnnnnnnnnnnnnnnnnnnnnnnnnnnnnnnnnnnnnnnnnnnnnnnnnnnnnnnnnnnnnnnnnnnnnnnnnnnnnnnnnnnnnnnnnnnnnnnnnnnnnnnnnnnnnnnnnnnnnnnnnnnnnnnnnnnnnnnnnnnnnnnnnnnnnnnnnnnnnnnnnnnnnnnnnnnnnnnnnnnnnnnnnnnnnnnnnnnnnnnnnnnnnnnnnnnnnnnnnnnnnnnnnnnnnnnnnnnnnnnnnnnnnnnnnnnnnnnnnnnnnnnnnnnnnnnnnnnnnnnnnnnnnnnnnnnnnnnnnnnnnnnnnnnnnnnnnnnnnnnnnnnnnnnnnnnnnnnnnnnnnnnnnnnnnnnnnnnnnnnnnnnnnnnnnnnnnnnnnnnnnnnnnnnnnnnnnnnnnnnnnnnnnnnnnnnnnnnnnnnnnnnnnnnnnnnnnnnnnnnnnnnnnnnnnnnnnnnnnnnnnnnnnnnnnnnnnnnnnnnnnnnnnnnnnnnnnnnnnnnnnnnnnnnnnnnnnnnnnnnnnnnnnnnnnnnnnnnnnnnnnnnnnnnnnnnnnnnnnnnnnnnnnnnnnnnnnnnnnnnnnnnnnnnnnnnnnnnnnnnnnnnnnnnnnnnnnnnnnnnnnnnnnnnnnnnnnnnnnnnnnnnnnnnnnnnnnnnnnnnnnnnnnnnnnnnnnnnnnnnnnnnnnnnnnnnnnnnnnnnnnnnnnnnnnnnnnnnnnnnnnnnnnnnnnnnnnnnnnnnnnnnnnnnnnnnnnnnnnnnnnnnnnnnnnnnnnnnnnnnnnnnnnnnnnnnnnnnnnnnnnnnnnnnnnnnnnnnnnnnnnnnnnnnnnnnnnnnnnnnnnnnnnnnnnnnnnnnnnnnnnnnnnnnnnnnnnnnnnnnnnnnnnnnnnnnnnnnnnnnnnnnnnnnnnnnnnnnnnnnnnnnnnnnnnnnnnnnnnnnnnnnnnnnnnnnnnnnnnnnnnnnnnnnnnnnnnnnnnnnnnnnnnnnnnnnnnnnnnnnnnnnnnnnnnnnnnnnnnnnnnnnnnnnnnnnnnnnnnnnnnnnnnnnnnnnnnnnnnnnnnnnnnnnnnnnnnnnnnnnnnnnnnnnnnnnnnnnnnnnnnnnnnnnnnnnnnnnnnnnnnnnnnnnnnnnnnnnnnnnnnnnnnnnnnnnnnnnnnnnnnnnnnnnnnnnnnnnnnnnnnnnnnnnnnnnnnnnnnnnnnnnnnnnnnnnnnnnnnnnnnnnnnnnnnnnnnnnnnnnnnnnnnnnnnnnnnnnnnnnnnnnnnnnnnnnnnnnnnnnnnnnnnnnnnnnnnnnnnnnnnnnnnnnnnnnnnnnnnnnnnnnnnnnnnnnnnnnnnnnnnnnnnnnnnnnnnnnnnnnnnnnnnnnnnnnnnnnnnnnnnnnnnnnnnnnnnnnnnnnnnnnnnnnnnnnnnnnnnnnnnnnnnnnnnnnnnnnnnnnnnnnnnnnnnnnnnnnnnnnnnnnnnnnnnnnnnnnnnnnnnnnnnnnnnnnnnnnnnnnnnnnnnnnnnnnnnnnnnnnnnnnnnnnnnnnnnnnnnnnnnnnnnnnnnnnnnnnnnnnnnnnnnnnnnnnnnnnnnnnnnnnnnnnnnnnnnnnnnnnnnnnnnnnnnnnnnnnnnnnnnnnnnnnnnnnnnnnnnnnnnnnnnnnnnnnnnnnnnnnnnnnnnnnnnnnnnnnnnnnnnnnnnnnnnnnnnnnnnnnnnnnnnnnnnnnnnnnnnnnnnnnnnnnnnnnnnnnnnnnnnnnnnnnnnnnnnnnnnnnnnnnnnnnnnnnnnnnnnnnnnnnnnnnnnnnnnnnnnnnnnnnnnnnnnnnnnnnnnnnnnnnnnnnnnnnnnnnnnnnnnnnnnnnnnnnnnnnnnnnnnnnnnnnnnnnnnnnnnnnnnnnnnnnnnnnnnnnnnnnnnnnnnnnnnnnnnnnnnnnnnnnnnnnnnnnnnnnnnnnnnnnnnnnnnnnnnnnnnnnnnnnnnnnnnnnnnnnnnnnnnnnnnnnnnnnnnnnnnnnnnnnnnnnnnnnnnnnnnnnnnnnnnnnnnnnnnnnnnnnnnnnnnnnnnnnnnnnnnnnnnnnnnnnnnnnnnnnnnnnnnnnnnnnnnnnnnnnnnnnnnnnnnnnnnnnnnnnnnnnnnnnnnnnnnnnnnnnnnnnnnnnnnnnnnnnnnnnnnnnnnnnnnnnnnnnnnnnnnnnnnnnnnnnnnnnnnnnnnnnnnnnnnnnnnnnnnnnnnnnnnnnnnnnnnnnnnnnnnnnnnnnnnnnnnnnnnnnnnnnnnnnnnnnnnnnnnnnnnnnnnnnnnnnnnnnnnnnnnnnnnnnnnnnnnnnnnnnnnnnnnnnnnnnnnnnnnnnnnnnnnnnnnnnnnnnnnnnnnnnnnnnnnnnnnnnnnnnnnnnnnnnnnnnnnnnnnnnnnnnnnnnnnnnnnnnnnnnnnnnnnnnnnnnnnnnnnnnnnnnnnnnnnnnnnnnnnnnnnnnnnnnnnnnnnnnnnnnnnnnnnnnnnnnnnnnnnnnnnnnnnnnnnnnnnnnnnnnnnnnnnnnnnnnnnnnnnnnnnnnnnnnnnnnnnnnnnnnnnnnnnnnnnnnnnnnnnnnnnnnnnnnnnnnnnnnnnnnnnnnnnnnnnnnnnnnnnnnnnnnnnnnnnnnnnnnnnnnnnnnnnnnnnnnnnnnnnnnnnnnnnnnnnnnnnnnnnnnnnnnnnnnnnnnnnnnnnnnnnnnnnnnnnnnnnnnnnnnnnnnnnnnnnnnnnnnnnnnnnnnnnnnnnnnnnnnnnnnnnnnnnnnnnnnnnnnnnnnnnnnnnnnnnnnnnnnnnnnnnnnnnnnnnnnnnnnnnnnnnnnnnnnnnnnnnnnnnnnnnnnnnnnnnnnnnnnnnnnnnnnnnnnnnnnnnnnnnnnnnnnnnnnnnnnnnnnnnnnnnnnnnnnnnnnnnnnnnnnnnnnnnnnnnnnnnnnnnnnnnnnnnnnnnnnnnnnnnnnnnnnnnnnnnnnnnnnnnnnnnnnnnnnnnnnnnnnnnnnnnnnnnnnnnnnnnnnnnnnnnnnnnnnnnnnnnnnnnnnnnnnnnnnnnnnnnnnnnnnnnnnnnnnnnnnnnnnnnnnnnnnnnnnnnnnnnnnnnnnnnnnnnnnnnnnnnnnnnnnnnnnnnnnnnnnnnnnnnnnnnnnnnnnnnnnnnnnnnnnnnnnnnnnnnnnnnnnnnnnnnnnnnnnnnnnnnnnnnnnnnnnnnnnnnnnnnnnnnnnnnnnnnnnnnnnnnnnnnnnnnnnnnnnnnnnnnnnnnnnnnnnnnnnnnnnnnnnnnnnnnnnnnnnnnnnnnnnnnnnnnnnnnnnnnnnnnnnnnnnnnnnnnnnnnnnnnnnnnnnnnnnnnnnnnnnnnnnnnnnnnnnnnnnnnnnnnnnnnnnnnnnnnnnnnnnnnnnnnnnnnnnnnnnnnnnnnnnnnnnnnnnnnnnnnnnnnnnnnnnnnnnnnnnnnnnnnnnnnnnnnnnnnnnnnnnnnnnnnnnnnnnnnnnnnnnnnnnnnnnnnnnnnnnnnnnnnnnnnnnnnnnnnnnnnnnnnnnnnnnnnnnnnnnnnnnnnnnnnnnnnnnnnnnnnnnnnnnnnnnnnnnnnnnnnnnnnnnnnnnnnnnnnnnnnnnnnnnnnnnnnnnnnnnnnnnnnnnnnnnnnnnnnnnnnnnnnnnnnnnnnnnnnnnnnnnnnnnnnnnnnnnnnnnnnnnnnnnnnnnnnnnnnnnnnnnnnnnnnnnnnnnnnnnnnnnnnnnnnnnnnnnnnnnnnnnnnnnnnnnnnnnnnnnnnnnnnnnnnnnnnnnnnnnnnnnnnnnnnnnnnnnnnnnnnnnnnnnnnnnnnnnnnnnnnnnnnnnnnnnnnnnnnnnnnnnnnnnnnnnnnnnnnnnnnnnnnnnnnnnnnnnnnnnnnnnnnnnnnnnnnnnnnnnnnnnnnnnnnnnnnnnnnnnnnnnnnnnnnnnnnnnnnnnnnnnnnnnnnnnnnnnnnnnnnnnnnnnnnnnnnnnnnnnnnnnnnnnnnnnnnnnnnnnnnnnnnnnnnnnnnnnnnnnnnnnnnnnnnnnnnnnnnnnnnnnnnnnnnnnnnnnnnnnnnnnnnnnnnnnnnnnnnnnnnnnnnnnnnnnnnnnnnnnnnnnnnnnnnnnnnnnnnnnnnnnnnnnnnnnnnnnnnnnnnnnnnnnnnnnnnnnnnnnnnnnnnnnnnnnnnnnnnnnnnnnnnnnnnnnnnnnnnnnnnnnnnnnnnnnnnnnnnnnnnnnnnnnnnnnnnnnnnnnnnnnnnnnnnnnnnnnnnnnnnnnnnnnnnnnnnnnnnnnnnnnnnnnnnnnnnnnnnnnnnnnnnnnnnnnnnnnnnnnnnnnnnnnnnnnnnnnnnnnnnnnnnnnnnnnnnnnnnnnnnnnnnnnnnnnnnnnnnnnnnnnnnnnnnnnnnnnnnnnnnnnnnnnnnnnnnnnnnnnnnnnnnnnnnnnnnnnnnnnnnnnnnnnnnnnnnnnnnnnnnnnnnnnnnnnnnnnnnnnnnnnnnnnnnnnnnnnnnnnnnnnnnnnnnnnnnnnnnnnnnnnnnnnnnnnnnnnnnnnnnnnnnnnnnnnnnnnnnnnnnnnnnnnnnnnnnnnnnnnnnnnnnnnnnnnnnnnnnnnnnnnnnnnnnnnnnnnnnnnnnnnnnnnnnnnnnnnnnnnnnnnnnnnnnnnnnnnnnnnnnnnnnnnnnnnnnnnnnnnnnnnnnnnnnnnnnnnnnnnnnnnnnnnnnnnnnnnnnnnnnnnnnnnnnnnnnnnnnnnnnnnnnnnnnnnnnnnnnnnnnnnnnnnnnnnnnnnnnnnnnnnnnnnnnnnnnnnnnnnnnnnnnnnnnnnnnnnnnnnnnnnnnnnnnnnnnnnnnnnnnnnnnnnnnnnnnnnnnnnnnnnnnnnnnnnnnnnnnnnnnnnnnnnnnnnnnnnnnnnnnnnnnnnnnnnnnnnnnnnnnnnnnnnnnnnnnnnnnnnnnnnnnnnnnnnnnnnnnnnnnnnnnnnnnnnnnnnnnnnnnnnnnnnnnnnnnnnnnnnnnnnnnnnnnnnnnnnnnnnnnnnnnnnnnnnnnnnnnnnnnnnnnnnnnnnnnnnnnnnnnnnnnnnnnnnnnnnnnnnnnnnnnnnnnnnnnnnnnnnnnnnnnnnnnnnnnnnnnnnnnnnnnnnnnnnnnnnnnnnnnnnnnnnnnnnnnnnnnnnnnnnnnnnnnnnnnnnnnnnnnnnnnnnnnnnnnnnnnnnnnnnnnnnnnnnnnnnnnnnnnnnnnnnnnnnnnnnnnnnnnnnnnnnnnnnnnnnnnnnnnnnnnnnnnnnnnnnnnnnnnnnnnnnnnnnnnnnnnnnnnnnnnnnnnnnnnnnnnnnnnnnnnnnnnnnnnnnnnnnnnnnnnnnnnnnnnnnnnnnnnnnnnnnnnnnnnnnnnnnnnnnnnnnnnnnnnnnnnnnnnnnnnnnnnnnnnnnnnnnnnnnnnnnnnnnnnnnnnnnnnnnnnnnnnnnnnnnnnnnnnnnnnnnnnnnnnnnnnnnnnnnnnnnnnnnnnnnnnnnnnnnnnnnnnnnnnnnnnnnnnnnnnnnnnnnnnnnnnnnnnnnnnnnnnnnnnnnnnnnnnnnnnnnnnnnnnnnnnnnnnnnnnnnnnnnnnnnnnnnnnnnnnnnnnnnnnnnnnnnnnnnnnnnnnnnnnnnnnnnnnnnnnnnnnnnnnnnnnnnnnnnnnnnnnnnnnnnnnnnnnnnnnnnnnnnnnnnnnnnnnnnnnnnnnnnnnnnnnnnnnnnnnnnnnnnnnnnnnnnnnnnnnnnnnnnnnnnnnnnnnnnnnnnnnnnnnnnnnnnnnnnnnnnnnnnnnnnnnnnnnnnnnnnnnnnnnnnnnnnnnnnnnnnnnnnnnnnnnnnnnnnnnnnnnnnnnnnnnnnnnnnnnnnnnnnnnnnnnnnnnnnnnnnnnnnnnnnnnnnnnnnnnnnnnnnnnnnnnnnnnnnnnnnnnnnnnnnnnnnnnnnnnnnnnnnnnnnnnnnnnnnnnnnnnnnnnnnnnnnnnnnnnnnnnnnnnnnnnnnnnnnnnnnnnnnnnnnnnnnnnnnnnnnnnnnnnnnnnnnnnnnnnnnnnnnnnnnnnnnnnnnnnnnnnnnnnnnnnnnnnnnnnnnnnnnnnnnnnnnnnnnnnnnnnnnnnnnnnnnnnnnnnnnnnnnnnnnnnnnnnnnnnnnnnnnnnnnnnnnnnnnnnnnnnnnnnnnnnnnnnnnnnnnnnnnnnnnnnnnnnnnnnnnnnnnnnnnnnnnnnnnnnnnnnnnnnnnnnnnnnnnnnnnnnnnnnnnnnnnnnnnnnnnnnnnnnnnnnnnnnnnnnnnnnnnnnnnnnnnnnnnnnnnnnnnnnnnnnnnnnnnnnnnnnnnnnnnnnnnnnnnnnnnnnnnnnnnnnnnnnnnnnnnnnnnnnnnnnnnnnnnnnnnnnnnnnnnnnnnnnnnnnnnnnnnnnnnnnnnnnnnnnnnnnnnnnnnnnnnnnnnnnnnnnnnnnnnnnnnnnnnnnnnnnnnnnnnnnnnnnnnnnnnnnnnnnnnnnnnnnnnnnnnnnnnnnnnnnnnnnnnnnnnnnnnnnnnnnnnnnnnnnnnnnnnnnnnnnnnnnnnnnnnnnnnnnnnnnnnnnnnnnnnnnnnnnnnnnnnnnnnnnnnnnnnnnnnnnnnnnnnnnnnnnnnnnnnnnnnnnnnnnnnnnnnnnnnnnnnnnnnnnnnnnnnnnnnnnnnnnnnnnnnnnnnnnnnnnnnnnnnnnnnnnnnnnnnnnnnnnnnnnnnnnnnnnnnnnnnnnnnnnnnnnnnnnnnnnnnnnnnnnnnnnnnnnnnnnnnnnnnnnnnnnnnnnnnnnnnnnnnnnnnnnnnnnnnnnnnnnnnnnnnnnnnnnnnnnnnnnnnnnnnnnnnnnnnnnnnnnnnnnnnnnnnnnnnnnnnnnnnnnnnnnnnnnnnnnnnnnnnnnnnnnnnnnnnnnnnnnnnnnnnnnnnnnnnnnnnnnnnnnnnnnnnnnnnnnnnnnnnnnnnnnnnnnnnnnnnnnnnnnnnnnnnnnnnnnnnnnnnnnnnnnnnnnnnnnnnnnnnnnnnnnnnnnnnnnnnnnnnnnnnnnnnnnnnnnnnnnnnnnnnnnnnnnnnnnnnnnnnnnnnnnnnnnnnnnnnnnnnnnnnnnnnnnnnnnnnnnnnnnnnnnnnnnnnnnnnnnnnnnnnnnnnnnnnnnnnnnnnnnnnnnnnnnnnnnnnnnnnnnnnnnnnnnnnnnnnnnnnnnnnnnnnnnnnnnnnnnnnnnnnnnnnnnnnnnnnnnnnnnnnnnnnnnnnnnnnnnnnnnnnnnnnnnnnnnnnnnnnnnnnnnnnnnnnnnnnnnnnnnnnnnnnnnnnnnnnnnnnnnnnnnnnnnnnnnnnnnnnnnnnnnnnnnnnnnnnnnnnnnnnnnnnnnnnnnnnnnnnnnnnnnnnnnnnnnnnnnnnnnnnnnnnnnnnnnnnnnnnnnnnnnnnnnnnnnnnnnnnnnnnnnnnnnnnnnnnnnnnnnnnnnnnnnnnnnnnnnnnnnnnnnnnnnnnnnnnnnnnnnnnnnnnnnnnnnnnnnnnnnnnnnnnnnnnnnnnnnnnnnnnnnnnnnnnnnnnnnnnnnnnnnnnnnnnnnnnnnnnnnnnnnnnnnnnnnnnnnnnnnnnnnnnnnnnnnnnnnnnnnnnnnnnnnnnnnnnnnnnnnnnnnnnnnnnnnnnnnnnnnnnnnnnnnnnnnnnnnnnnnnnnnnnnnnnnnnnnnnnnnnnnnnnnnnnnnnnnnnnnnnnnnnnnnnnnnnnnnnnnnnnnnnnnnnnnnnnnnnnnnnnnnnnnnnnnnnnnnnnnnnnnnnnnnnnnnnnnnnnnnnnnnnnnnnnnnnnnnnnnnnnnnnnnnnnnnnnnnnnnnnnnnnnnnnnnnnnnnnnnnnnnnnnnnnnnnnnnnnnnnnnnnnnnnnnnnnnnnnnnnnnnnnnnnnnnnnnnnnnnnnnnnnnnnnnnnnnnnnnnnnnnnnnnnnnnnnnnnnnnnnnnnnnnnnnnnnnnnnnnnnnnnnnnnnnnnnnnnnnnnnnnnnnnnnnnnnnnnnnnnnnnnnnnnnnnnnnnnnnnnnnnnnnnnnnnnnnnnnnnnnnnnnnnnnnnnnnnnnnnnnnnnnnnnnnnnnnnnnnnnnnnnnnnnnnnnnnnnnnnnnnnnnnnnnnnnnnnnnnnnnnnnnnnnnnnnnnnnnnnnnnnnnnnnnnnnnnnnnnnnnnnnnnnnnnnnnnnnnnnnnnnnnnnnnnnnnnnnnnnnnnnnnnnnnnnnnnnnnnnnnnnnnnnnnnnnnnnnnnnnnnnnnnnnnnnnnnnnnnnnnnnnnnnnnnnnnnnnnnnnnnnnnnnnnnnnnnnnnnnnnnnnnnnnnnnnnnnnnnnnnnnnnnnnnnnnnnnnnnnnnnnnnnnnnnnnnnnnnnnnnnnnnnnnnnnnnnnnnnnnnnnnnnnnnnnnnnnnnnnnnnnnnnnnnnnnnnnnnnnnnnnnnnnnnnnnnnnnnnnnnnnnnnnnnnnnnnnnnnnnnnnnnnnnnnnnnnnnnnnnnnnnnnnnnnnnnnnnnnnnnnnnnnnnnnnnnnnnnnnnnnnnnnnnnnnnnnnnnnnnnnnnnnnnnnnnnnnnnnnnnnnnnnnnnnnnnnnnnnnnnnnnnnnnnnnnnnnnnnnnnnnnnnnnnnnnnnnnnnnnnnnnnnnnnnnnnnnnnnnnnnnnnnnnnnnnnnnnnnnnnnnnnnnnnnnnnnnnnnnnnnnnnnnnnnnnnnnnnnnnnnnnnnnnnnnnnnnnnnnnnnnnnnnnnnnnnnnnnnnnnnnnnnnnnnnnnnnnnnnnnnnnnnnnnnnnnnnnnnnnnnnnnnnnnnnnnnnnnnnnnnnnnnnnnnnnnnnnnnnnnnnnnnnnnnnnnnnnnnnnnnnnnnnnnnnnnnnnnnnnnnnnnnnnnnnnnnnnnnnnnnnnnnnnnnnnnnnnnnnnnnnnnnnnnnnnnnnnnnnnnnnnnnnnnnnnnnnnnnnnnnnnnnnnnnnnnnnnnnnnnnnnnnnnnnnnnnnnnnnnnnnnnnnnnnnnnnnnnnnnnnnnnnnnnnnnnnnnnnnnnnnnnnnnnnnnnnnnnnnnnnnnnnnnnnnnnnnnnnnnnnnnnnnnnnnnnnnnnnnnnnnnnnnnnnnnnnnnnnnnnnnnnnnnnnnnnnnnnnnnnnnnnnnnnnnnnnnnnnnnnnnnnnnnnnnnnnnnnnnnnnnnnnnnnnnnnnnnnnnnnnnnnnnnnnnnnnnnnnnnnnnnnnnnnnnnnnnnnnnnnnnnnnnnnnnnnnnnnnnnnnnnnnnnnnnnnnnnnnnnnnnnnnnnnnnnnnnnnnnnnnnnnnnnnnnnnnnnnnnnnnnnnnnnnnnnnnnnnnnnnnnnnnnnnnnnnnnnnnnnnnnnnnnnnnnnnnnnnnnnnnnnnnnnnnnnnnnnnnnnnnnnnnnnnnnnnnnnnnnnnnnnnnnnnnnnnnnnnnnnnnnnnnnnnnnnnnnnnnnnnnnnnnnnnnnnnnnnnnnnnnnnnnnnnnnnnnnnnnnnnnnnnnnnnnnnnnnnnnnnnnnnnnnnnnnnnnnnnnnnnnnnnnnnnnnnnnnnnnnnnnnnnnnnnnnnnnnnnnnnnnnnnnnnnnnnnnnnnnnnnnnnnnnnnnnnnnnnnnnnnnnnnnnnnnnnnnnnnnnnnnnnnnnnnnnnnnnnnnnnnnnnnnnnnnnnnnnnnnnnnnnnnnnnnnnnnnnnnnnnnnnnnnnnnnnnnnnnnnnnnnnnnnnnnnnnnnnnnnnnnnnnnnnnnnnnnnnnnnnnnnnnnnnnnnnnnnnnnnnnnnnnnnnnnnnnnnnnnnnnnnnnnnnnnnnnnnnnnnnnnnnnnnnnnnnnnnnnnnnnnnnnnnnnnnnnnnnnnnnnnnnnnnnnnnnnnnnnnnnnnnnnnnnnnnnnnnnnnnnnnnnnnnnnnnnnnnnnnnnnnnnnnnnnnnnnnnnnnnnnnnnnnnnnnnnnnnnnnnnnnnnnnnnnnnnnnnnnnnnnnnnnnnnnnnnnnnnnnnnnnnnnnnnnnnnnnnnnnnnnnnnnnnnnnnnnnnnnnnnnnnnnnnnnnnnnnnnnnnnnnnnnnnnnnnnnnnnnnnnnnnnnnnnnnnnnnnnnnnnnnnnnnnnnnnnnnnnnnnnnnnnnnnnnnnnnnnnnnnnnnnnnnnnnnnnnnnnnnnnnnnnnnnnnnnnnnnnnnnnnnnnnnnnnnnnnnnnnnnnnnnnnnnnnnnnnnnnnnnnnnnnnnnnnnnnnnnnnnnnnnnnnnnnnnnnnnnnnnnnnnnnnnnnnnnnnnnnnnnnnnnnnnnnnnnnnnnnnnnnnnnnnnnnnnnnnnnnnnnnnnnnnnnnnnnnnnnnnnnnnnnnnnnnnnnnnnnnnnnnnnnnnnnnnnnnnnnnnnnnnnnnnnnnnnnnnnnnnnnnnnnnnnnnnnnnnnnnnnnnnnnnnnnnnnnnnnnnnnnnnnnnnnnnnnnnnnnnnnnnnnnnnnnnnnnnnnnnnnnnnnnnnnnnnnnnnnnnnnnnnnnnnnnnnnnnnnnnnnnnnnnnnnnnnnnnnnnnnnnnnnnnnnnnnnnnnnnnnnnnnnnnnnnnnnnnnnnnnnnnnnnnnnnnnnnnnnnnnnnnnnnnnnnnnnnnnnnnnnnnnnnnnnnnnnnnnnnnnnnnnnnnnnnnnnnnnnnnnnnnnnnnnnnnnnnnnnnnnnnnnnnnnnnnnnnnnnnnnnnnnnnnnnnnnnnnnnnnnnnnnnnnnnnnnnnnnnnnnnnnnnnnnnnnnnnnnnnnnnnnnnnnnnnnnnnnnnnnnnnnnnnnnnnnnnnnnnnnnnnnnnnnnnnnnnnnnnnnnnnnnnnnnnnnnnnnnnnnnnnnnnnnnnnnnnnnnnnnnnnnnnnnnnnnnnnnnnnnnnnnnnnnnnnnnnnnnnnnnnnnnnnnnnnnnnnnnnnnnnnnnnnnnnnnnnnnnnnnnnnnnnnnnnnnnnnnnnnnnnnnnnnnnnnnnnnnnnnnnnnnnnnnnnnnnnnnnnnnnnnnnnnnnnnnnnnnnnnnnnnnnnnnnnnnnnnnnnnnnnnnnnnnnnnnnnnnnnnnnnnnnnnnnnnnnnnnnnnnnnnnnnnnnnnnnnnnnnnnnnnnnnnnnnnnnnnnnnnnnnnnnnnnnnnnnnnnnnnnnnnnnnnnnnnnnnnnnnnnnnnnnnnnnnnnnnnnnnnnnnnnnnnnnnnnnnnnnnnnnnnnnnnnnnnnnnnnnnnnnnnnnnnnnnnnnnnnnnnnnnnnnnnnnnnnnnnnnnnnnnnnnnnnnnnnnnnnnnnnnnnnnnnnnnnnnnnnnnnnnnnnnnnnnnnnnnnnnnnnnnnnnnnnnnnnnnnnnnnnnnnnnnnnnnnnnnnnnnnnnnnnnnnnnnnnnnnnnnnnnnnnnnnnnnnnnnnnnnnnnnnnnnnnnnnnnnnnnnnnnnnnnnnnnnnnnnnnnnnnnnnnnnnnnnnnnnnnnnnnnnnnnnnnnnnnnnnnnnnnnnnnnnnnnnnnnnnnnnnnnnnnnnnnnnnnnnnnnnnnnnnnnnnnnnnnnnnnnnnnnnnnnnnnnnnnnnnnnnnnnnnnnnnnnnnnnnnnnnnnnnnnnnnnnnnnnnnnnnnnnnnnnnnnnnnnnnnnnnnnnnnnnnnnnnnnnnnnnnnnnnnnnnnnnnnnnnnnnnnnnnnnnnnnnnnnnnnnnnnnnnnnnnnnnnnnnnnnnnnnnnnnnnnnnnnnnnnnnnnnnnnnnnnnnnnnnnnnnnnnnnnnnnnnnnnnnnnnnnnnnnnnnnnnnnnnnnnnnnnnnnnnnnnnnnnnnnnnnnnnnnnnnnnnnnnnnnnnnnnnnnnnnnnnnnnnnnnnnnnnnnnnnnnnnnnnnnnnnnnnnnnnnnnnnnnnnnnnnnnnnnnnnnnnnnnnnnnnnnnnnnnnnnnnnnnnnnnnnnnnnnnnnnnnnnnnnnnnnnnnnnnnnnnnnnnnnnnnnnnnnnnnnnnnnnnnnnnnnnnnnnnnnnnnnnnnnnnnnnnnnnnnnnnnnnnnnnnnnnnnnnnnnnnnnnnnnnnnnnnnnnnnnnnnnnnnnnnnnnnnnnnnnnnnnnnnnnnnnnnnnnnnnnnnnnnnnnnnnnnnnnnnnnnnnnnnnnnnnnnnnnnnnnnnnnnnnnnnnnnnnnnnnnnnnnnnnnnnnnnnnnnnnnnnnnnnnnnnnnnnnnnnnnnnnnnnnnnnnnnnnnnnnnnnnnnnnnnnnnnnnnnnnnnnnnnnnnnnnnnnnnnnnnnnnnnnnnnnnnnnnnnnnnnnnnnnnnnnnnnnnnnnnnnnnnnnnnnnnnnnnnnnnnnnnnnnnnnnnnnnnnnnnnnnnnnnnnnnnnnnnnnnnnnnnnnnnnnnnnnnnnnnnnnnnnnnnnnnnnnnnnnnnnnnnnnnnnnnnnnnnnnnnnnnnnnnnnnnnnnnnnnnnnnnnnnnnnnnnnnnnnnnnnnnnnnnnnnnnnnnnnnnnnnnnnnnnnnnnnnnnnnnnnnnnnnnnnnnnnnnnnnnnnnnnnnnnnnnnnnnnnnnnnnnnnnnnnnnnnnnnnnnnnnnnnnnnnnnnnnnnnnnnnnnnnnnnnnnnnnnnnnnnnnnnnnnnnnnnnnnnnnnnnnnnnnnnnnnnnnnnnnnnnnnnnnnnnnnnnnnnnnnnnnnnnnnnnnnnnnnnnnnnnnnnnnnnnnnnnnnnnnnnnnnnnnnnnnnnnnnnnnnnnnnnnnnnnnnnnnnnnnnnnnnnnnnnnnnnnnnnnnnnnnnnnnnnnnnnnnnnnnnnnnnnnnnnnnnnnnnnnnnnnnnnnnnnnnnnnnnnnnnnnnnnnnnnnnnnnnnnnnnnnnnnnnnnnnnnnnnnnnnnnnnnnnnnnnnnnnnnnnnnnnnnnnnnnnnnnnnnnnnnnnnnnnnnnnnnnnnnnnnnnnnnnnnnnnnnnnnnnnnnnnnnnnnnnnnnnnnnnnnnnnnnnnnnnnnnnnnnnnnnnnnnnnnnnnnnnnnnnnnnnnnnnnnnnnnnnnnnnnnnnnnnnnnnnnnnnnnnnnnnnnnnnnnnnnnnnnnnnnnnnnnnnnnnnnnnnnnnnnnnnnnnnnnnnnnnnnnnnnnnnnnnnnnnnnnnnnnnnnnnnnnnnnnnnnnnnnnnnnnnnnnnnnnnnnnnnnnnnnnnnnnnnnnnnnnnnnnnnnnnnnnnnnnnnnnnnnnnnnnnnnnnnnnnnnnnnnnnnnnnnnnnnnnnnnnnnnnnnnnnnnnnnnnnnnnnnnnnnnnnnnnnnnnnnnnnnnnnnnnnnnnnnnnnnnnnnnnnnnnnnnnnnnnnnnnnnnnnnnnnnnnnnnnnnnnnnnnnnnnnnnnnnnnnnnnnnnnnnnnnnnnnnnnnnnnnnnnnnnnnnnnnnnnnnnnnnnnnnnnnnnnnnnnnnnnnnnnnnnnnnnnnnnnnnnnnnnnnnnnnnnnnnnnnnnnnnnnnnnnnnnnnnnnnnnnnnnnnnnnnnnnnnnnnnnnnnnnnnnnnnnnnnnnnnnnnnnnnnnnnnnnnnnnnnnnnnnnnnnnnnnnnnnnnnnnnnnnnnnnnnnnnnnnnnnnnnnnnnnnnnnnnnnnnnnnnnnnnnnnnnnnnnnnnnnnnnnnnnnnnnnnnnnnnnnnnnnnnnnnnnnnnnnnnnnnnnnnnnnnnnnnnnnnnnnnnnnnnnnnnnnnnnnnnnnnnnnnnnnnnnnnnnnnnnnnnnnnnnnnnnnnnnnnnnnnnnnnnnnnnnnnnnnnnnnnnnnnnnnnnnnnnnnnnnnnnnnnnnnnnnnnnnnnnnnnnnnnnnnnnnnnnnnnnnnnnnnnnnnnnnnnnnnnnnnnnnnnnnnnnnnnnnnnnnnnnnnnnnnnnnnnnnnnnnnnnnnnnnnnnnnnnnnnnnnnnnnnnnnnnnnnnnnnnnnnnnnnnnnnnnnnnnnnnnnnnnnnnnnnnnnnnnnnnnnnnnnnnnnnnnnnnnnnnnnnnnnnnnnnnnnnnnnnnnnnnnnnnnnnnnnnnnnnnnnnnnnnnnnnnnnnnnnnnnnnnnnnnnnnnnnnnnnnnnnnnnnnnnnnnnnnnnnnnnnnnnnnnnnnnnnnnnnnnnnnnnnnnnnnnnnnnnnnnnnnnnnnnnnnnnnnnnnnnnnnnnnnnnnnnnnnnnnnnnnnnnnnnnnnnnnnnnnnnnnnnnnnnnnnnnnnnnnnnnnnnnnnnnnnnnnnnnnnnnnnnnnnnnnnnnnnnnnnnnnnnnnnnnnnnnnnnnnnnnnnnnnnnnnnnnnnnnnnnnnnnnnnnnnnnnnnnnnnnnnnnnnnnnnnnnnnnnnnnnnnnnnnnnnnnnnnnnnnnnnnnnnnnnnnnnnnnnnnnnnnnnnnnnnnnnnnnnnnnnnnnnnnnnnnnnnnnnnnnnnnnnnnnnnnnnnnnnnnnnnnnnnnnnnnnnnnnnnnnnnnnnnnnnnnnnnnnnnnnnnnnnnnnnnnnnnnnnnnnnnnnnnnnnnnnnnnnnnnnnnnnnnnnnnnnnnnnnnnnnnnnnnnnnnnnnnnnnnnnnnnnnnnnnnnnnnnnnnnnnnnnnnnnnnnnnnnnnnnnnnnnnnnnnnnnnnnnnnnnnnnnnnnnnnnnnnnnnnnnnnnnnnnnnnnnnnnnnnnnnnnnnnnnnnnnnnnnnnnnnnnnnnnnnnnnnnnnnnnnnnnnnnnnnnnnnnnnnnnnnnnnnnnnnnnnnnnnnnnnnnnnnnnnnnnnnnnnnnnnnnnnnnnnnnnnnnnnnnnnnnnnnnnnnnnnnnnnnnnnnnnnnnnnnnnnnnnnnnnnnnnnnnnnnnnnnnnnnnnnnnnnnnnnnnnnnnnnnnnnnnnnnnnnnnnnnnnnnnnnnnnnnnnnnnnnnnnnnnnnnnnnnnnnnnnnnnnnnnnnnnnnnnnnnnnnnnnnnnnnnnnnnnnnnnnnnnnnnnnnnnnnnnnnnnnnnnnnnnnnnnnnnnnnnnnnnnnnnnnnnnnnnnnnnnnnnnnnnnnnnnnnnnnnnnnnnnnnnnnnnnnnnnnnnnnnnnnnnnnnnnnnnnnnnnnnnnnnnnnnnnnnnnnnnnnnnnnnnnnnnnnnnnnnnnnnnnnnnnnnnnnnnnnnnnnnnnnnnnnnnnnnnnnnnnnnnnnnnnnnnnnnnnnnnnnnnnnnnnnnnnnnnnnnnnnnnnnnnnnnnnnnnnnnnnnnnnnnnnnnnnnnnnnnnnnnnnnnnnnnnnnnnnnnnnnnnnnnnnnnnnnnnnnnnnnnnnnnnnnnnnnnnnnnnnnnnnnnnnnnnnnnnnnnnnnnnnnnnnnnnnnnnnnnnnnnnnnnnnnnnnnnnnnnnnnnnnnnnnnnnnnnnnnnnnnnnnnnnnnnnnnnnnnnnnnnnnnnnnnnnnnnnnnnnnnnnnnnnnnnnnnnnnnnnnnnnnnnnnnnnnnnnnnnnnnnnnnnnnnnnnnnnnnnnnnnnnnnnnnnnnnnnnnnnnnnnnnnnnnnnnnnnnnnnnnnnnnnnnnnnnnnnnnnnnnnnnnnnnnnnnnnnnnnnnnnnnnnnnnnnnnnnnnnnnnnnnnnnnnnnnnnnnnnnnnnnnnnnnnnnnnnnnnnnnnnnnnnnnnnnnnnnnnnnnnnnnnnnnnnnnnnnnnnnnnnnnnnnnnnnnnnnnnnnnnnnnnnnnnnnnnnnnnnnnnnnnnnnnnnnnnnnnnnnnnnnnnnnnnnnnnnnnnnnnnnnnnnnnnnnnnnnnnnnnnnnnnnnnnnnnnnnnnnnnnnnnnnnnnnnnnnnnnnnnnnnnnnnnnnnnnnnnnnnnnnnnnnnnnnnnnnnnnnnnnnnnnnnnnnnnnnnnnnnnnnnnnnnnnnnnnnnnnnnnnnnnnnnnnnnnnnnnnnnnnnnnnnnnnnnnnnnnnnnnnnnnnnnnnnnnnnnnnnnnnnnnnnnnnnnnnnnnnnnnnnnnnnnnnnnnnnnnnnnnnnnnnnnnnnnnnnnnnnnnnnnnnnnnnnnnnnnnnnnnnnnnnnnnnnnnnnnnnnnnnnnnnnnnnnnnnnnnnnnnnnnnnnnnnnnnnnnnnnnnnnnnnnnnnnnnnnnnnnnnnnnnnnnnnnnnnnnnnnnnnnnnnnnnnnnnnnnnnnnnnnnnnnnnnnnnnnnnnnnnnnnnnnnnnnnnnnnnnnnnnnnnnnnnnnnnnnnnnnnnnnnnnnnnnnnnnnnnnnnnnnnnnnnnnnnnnnnnnnnnnnnnnnnnnnnnnnnnnnnnnnnnnnnnnnnnnnnnnnnnnnnnnnnnnnnnnnnnnnnnnnnnnnnnnnnnnnnnnnnnnnnnnnnnnnnnnnnnnnnnnnnnnnnnnnnnnnnnnnnnnnnnnnnnnnnnnnnnnnnnnnnnnnnnnnnnnnnnnnnnnnnnnnnnnnnnnnnnnnnnnnnnnnnnnnnnnnnnnnnnnnnnnnnnnnnnnnnnnnnnnnnnnnnnnnnnnnnnnnnnnnnnnnnnnnnnnnnnnnnnnnnnnnnnnnnnnnnnnnnnnnnnnnnnnnnnnnnnnnnnnnnnnnnnnnnnnnnnnnnnnnnnnnnnnnnnnnnnnnnnnnnnnnnnnnnnnnnnnnnnnnnnnnnnnnnnnnnnnnnnnnnnnnnnnnnnnnnnnnnnnnnnnnnnnnnnnnnnnnnnnnnnnnnnnnnnnnnnnnnnnnnnnnnnnnnnnnnnnnnnnnnnnnnnnnnnnnnnnnnnnnnnnnnnnnnnnnnnnnnnnnnnnnnnnnnnnnnnnnnnnnnnnnnnnnnnnnnnnnnnnnnnnnnnnnnnnnnnnnnnnnnnnnnnnnnnnnnnnnnnnnnnnnnnnnnnnnnnnnnnnnnnnnnnnnnnnnnnnnnnnnnnnnnnnnnnnnnnnnnnnnnnnnnnnnnnnnnnnnnnnnnnnnnnnnnnnnnnnnnnnnnnnnnnnnnnnnnnnnnnnnnnnnnnnnnnnnnnnnnnnnnnnnnnnnnnnnnnnnnnnnnnnnnnnnnnnnnnnnnnnnnnnnnnnnnnnnnnnnnnnnnnnnnnnnnnnnnnnnnnnnnnnnnnnnnnnnnnnnnnnnnnnnnnnnnnnnnnnnnnnnnnnnnnnnnnnnnnnnnnnnnnnnnnnnnnnnnnnnnnnnnnnnnnnnnnnnnnnnnnnnnnnnnnnnnnnnnnnnnnnnnnnnnnnnnnnnnnnnnnnnnnnnnnnnnnnnnnnnnnnnnnnnnnnnnnnnnnnnnnnnnnnnnnnnnnnnnnnnnnnnnnnnnnnnnnnnnnnnnnnnnnnnnnnnnnnnnnnnnnnnnnnnnnnnnnnnnnnnnnnnnnnnnnnnnnnnnnnnnnnnnnnnnnnnnnnnnnnnnnnnnnnnnnnnnnnnnnnnnnnnnnnnnnnnnnnnnnnnnnnnnnnnnnnnnnnnnnnnnnnnnnnnnnnnnnnnnnnnnnnnnnnnnnnnnnnnnnnnnnnnnnnnnnnnnnnnnnnnnnnnnnnnnnnnnnnnnnnnnnnnnnnnnnnnnnnnnnnnnnnnnnnnnnnnnnnnnnnnnnnnnnnnnnnnnnnnnnnnnnnnnnnnnnnnnnnnnnnnnnnnnnnnnnnnnnnnnnnnnnnnnnnnnnnnnnnnnnnnnnnnnnnnnnnnnnnnnnnnnnnnnnnnnnnnnnnnnnnnnnnnnnnnnnnnnnnnnnnnnnnnnnnnnnnnnnnnnnnnnnnnnnnnnnnnnnnnnnnnnnnnnnnnnnnnnnnnnnnnnnnnnnnnnnnnnnnnnnnnnnnnnnnnnnnnnnnnnnnnnnnnnnnnnnnnnnnnnnnnnnnnnnnnnnnnnnnnnnnnnnnnnnnnnnnnnnnnnnnnnnnnnnnnnnnnnnnnnnnnnnnnnnnnnnnnnnnnnnnnnnnnnnnnnnnnnnnnnnnnnnnnnnnnnnnnnnnnnnnnnnnnnnnnnnnnnnnnnnnnnnnnnnnnnnnnnnnnnnnnnnnnnnnnnnnnnnnnnnnnnnnnnnnnnnnnnnnnnnnnnnnnnnnnnnnnnnnnnnnnnnnnnnnnnnnnnnnnnnnnnnnnnnnnnnnnnnnnnnnnnnnnnnnnnnnnnnnnnnnnnnnnnnnnnnnnnnnnnnnnnnnnnnnnnnnnnnnnnnnnnnnnnnnnnnnnnnnnnnnnnnnnnnnnnnnnnnnnnnnnnnnnnnnnnnnnnnnnnnnnnnnnnnnnnnnnnnnnnnnnnnnnnnnnnnnnnnnnnnnnnnnnnnnnnnnnnnnnnnnnnnnnnnnnnnnnnnnnnnnnnnnnnnnnnnnnnnnnnnnnnnnnnnnnnnnnnnnnnnnnnnnnnnnnnnnnnnnnnnnnnnnnnnnnnnnnnnnnnnnnnnnnnnnnnnnnnnnnnnnnnnnnnnnnnnnnnnnnnnnnnnnnnnnnnnnnnnnnnnnnnnnnnnnnnnnnnnnnnnnnnnnnnnnnnnnnnnnnnnnnnnnnnnnnnnnnnnnnnnnnnnnnnnnnnnnnnnnnnnnnnnnnnnnnnnnnnnnnnnnnnnnnnnnnnnnnnnnnnnnnnnnnnnnnnnnnnnnnnnnnnnnnnnnnnnnnnnnnnnnnnnnnnnnnnnnnnnnnnnnnnnnnnnnnnnnnnnnnnnnnnnnnnnnnnnnnnnnnnnnnnnnnnnnnnnnnnnnnnnnnnnnnnnnnnnnnnnnnnnnnnnnnnnnnnnnnnnnnnnnnnnnnnnnnnnnnnnnnnnnnnnnnnnnnnnnnnnnnnnnnnnnnnnnnnnnnnnnnnnnnnnnnnnnnnnnnnnnnnnnnnnnnnnnnnnnnnnnnnnnnnnnnnnnnnnnnnnnnnnnnnnnnnnnnnnnnnnnnnnnnnnnnnnnnnnnnnnnnnnnnnnnnnnnnnnnnnnnnnnnnnnnnnnnnnnnnnnnnnnnnnnnnnnnnnnnnnnnnnnnnnnnnnnnnnnnnnnnnnnnnnnnnnnnnnnnnnnnnnnnnnnnnnnnnnnnnnnnnnnnnnnnnnnnnnnnnnnnnnnnnnnnnnnnnnnnnnnnnnnnnnnnnnnnnnnnnnnnnnnnnnnnnnnnnnnnnnnnnnnnnnnnnnnnnnnnnnnnnnnnnnnnnnnnnnnnnnnnnnnnnnnnnnnnnnnnnnnnnnnnnnnnnnnnnnnnnnnnnnnnnnnnnnnnnnnnnnnnnnnnnnnnnnnnnnnnnnnnnnnnnnnnnnnnnnnnnnnnnnnnnnnnnnnnnnnnnnnnnnnnnnnnnnnnnnnnnnnnnnnnnnnnnnnnnnnnnnnnnnnnnnnnnnnnnnnnnnnnnnnnnnnnnnnnnnnnnnnnnnnnnnnnnnnnnnnnnnnnnnnnnnnnnnnnnnnnnnnnnnnnnnnnnnnnnnnnnnnnnnnnnnnnnnnnnnnnnnnnnnnnnnnnnnnnnnnnnnnnnnnnnnnnnnnnnnnnnnnnnnnnnnnnnnnnnnnnnnnnnnnnnnnnnnnnnnnnnnnnnnnnnnnnnnnnnnnnnnnnnnnnnnnnnnnnnnnnnnnnnnnnnnnnnnnnnnnnnnnnnnnnnnnnnnnnnnnnnnnnnnnnnnnnnnnnnnnnnnnnnnnnnnnnnnnnnnnnnnnnnnnnnnnnnnnnnnnnnnnnnnnnnnnnnnnnnnnnnnnnnnnnnnnnnnnnnnnnnnnnnnnnnnnnnnnnnnnnnnnnnnnnnnnnnnnnnnnnnnnnnnnnnnnnnnnnnnnnnnnnnnnnnnnnnnnnnnnnnnnnnnnnnnnnnnnnnnnnnnnnnnnnnnnnnnnnnnnnnnnnnnnnnnnnnnnnnnnnnnnnnnnnnnnnnnnnnnnnnnnnnnnnnnnnnnnnnnnnnnnnnnnnnnnnnnnnnnnnnnnnnnnnnnnnnnnnnnnnnnnnnnnnnnnnnnnnnnnnnnnnnnnnnnnnnnnnnnnnnnnnnnnnnnnnnnnnnnnnnnnnnnnnnnnnnnnnnnnnnnnnnnnnnnnnnnnnnnnnnnnnnnnnnnnnnnnnnnnnnnnnnnnnnnnnnnnnnnnnnnnnnnnnnnnnnnnnnnnnnnnnnnnnnnnnnnnnnnnnnnnnnnnnnnnnnnnnnnnnnnnnnnnnnnnnnnnnnnnnnnnnnnnnnnnnnnnnnnnnnnnnnnnnnnnnnnnnnnnnnnnnnnnnnnnnnnnnnnnnnnnnnnnnnnnnnnnnnnnnnnnnnnnnnnnnnnnnnnnnnnnnnnnnnnnnnnnnnnnnnnnnnnnnnnnnnnnnnnnnnnnnnnnnnnnnnnnnnnnnnnnnnnnnnnnnnnnnnnnnnnnnnnnnnnnnnnnnnnnnnnnnnnnnnnnnnnnnnnnnnnnnnnnnnnnnnnnnnnnnnnnnnnnnnnnnnnnnnnnnnnnnnnnnnnnnnnnnnnnnnnnnnnnnnnnnnnnnnnnnnnnnnnnnnnnnnnnnnnnnnnnnnnnnnnnnnnnnnnnnnnnnnnnnnnnnnnnnnnnnnnnnnnnnnnnnnnnnnnnnnnnnnnnnnnnnnnnnnnnnnnnnnnnnnnnnnnnnnnnnnnnnnnnnnnnnnnnnnnnnnnnnnnnnnnnnnnnnnnnnnnnnnnnnnnnnnnnnnnnnnnnnnnnnnnnnnnnnnnnnnnnnnnnnnnnnnnnnnnnnnnnnnnnnnnnnnnnnnnnnnnnnnnnnnnnnnnnnnnnnnnnnnnnnnnnnnnnnnnnnnnnnnnnnnnnnnnnnnnnnnnnnnnnnnnnnnnnnnnnnnnnnnnnnnnnnnnnnnnnnnnnnnnnnnnnnnnnnnnnnnnnnnnnnnnnnnnnnnnnnnnnnnnnnnnnnnnnnnnnnnnnnnnnnnnnnnnnnnnnnnnnnnnnnnnnnnnnnnnnnnnnnnnnnnnnnnnnnnnnnnnnnnnnnnnnnnnnnnnnnnnnnnnnnnnnnnnnnnnnnnnnnnnnnnnnnnnnnnnnnnnnnnnnnnnnnnnnnnnnnnnnnnnnnnnnnnnnnnnnnnnnnnnnnnnnnnnnnnnnnnnnnnnnnnnnnnnnnnnnnnnnnnnnnnnnnnnnnnnnnnnnnnnnnnnnnnnnnnnnnnnnnnnnnnnnnnnnnnnnnnnnnnnnnnnnnnnnnnnnnnnnnnnnnnnnnnnnnnnnnnnnnnnnnnnnnnnnnnnnnnnnnnnnnnnnnnnnnnnnnnnnnnnnnnnnnnnnnnnnnnnnnnnnnnnnnnnnnnnnnnnnnnnnnnnnnnnnnnnnnnnnnnnnnnnnnnnnnnnnnnnnnnnnnnnnnnnnnnnnnnnnnnnnnnnnnnnnnnnnnnnnnnnnnnnnnnnnnnnnnnnnnnnnnnnnnnnnnnnnnnnnnnnnnnnnnnnnnnnnnnnnnnnnnnnnnnnnnnnnnnnnnnnnnnnnnnnnnnnnnnnnnnnnnnnnnnnnnnnnnnnnnnnnnnnnnnnnnnnnnnnnnnnnnnnnnnnnnnnnnnnnnnnnnnnnnnnnnnnnnnnnnnnnnnnnnnnnnnnnnnnnnnnnnnnnnnnnnnnnnnnnnnnnnnnnnnnnnnnnnnnnnnnnnnnnnnnnnnnnnnnnnnnnnnnnnnnnnnnnnnnnnnnnnnnnnnnnnnnnnnnnnnnnnnnnnnnnnnnnnnnnnnnnnnnnnnnnnnnnnnnnnnnnnnnnnnnnnnnnnnnnnnnnnnnnnnnnnnnnnnnnnnnnnnnnnnnnnnnnnnnnnnnnnnnnnnnnnnnnnnnnnnnnnnnnnnnnnnnnnnnnnnnnnnnnnnnnnnnnnnnnnnnnnnnnnnnnnnnnnnnnnnnnnnnnnnnnnnnnnnnnnnnnnnnnnnnnnnnnnnnnnnnnnnnnnnnnnnnnnnnnnnnnnnnnnnnnnnnnnnnnnnnnnnnnnnnnnnnnnnnnnnnnnnnnnnnnnnnnnnnnnnnnnnnnnnnnnnnnnnnnnnnnnnnnnnnnnnnnnnnnnnnnnnnnnnnnnnnnnnnnnnnnnnnnnnnnnnnnnnnnnnnnnnnnnnnnnnnnnnnnnnnnnnnnnnnnnnnnnnnnnnnnnnnnnnnnnnnnnnnnnnnnnnnnnnnnnnnnnnnnnnnnnnnnnnnnnnnnnnnnnnnnnnnnnnnnnnnnnnnnnnnnnnnnnnnnnnnnnnnnnnnnnnnnnnnnnnnnnnnnnnnnnnnnnnnnnnnnnnnnnnnnnnnnnnnnnnnnnnnnnnnnnnnnnnnnnnnnnnnnnnnnnnnnnnnnnnnnnnnnnnnnnnnnnnnnnnnnnnnnnnnnnnnnnnnnnnnnnnnnnnnnnnnnnnnnnnnnnnnnnnnnnnnnnnnnnnnnnnnnnnnnnnnnnnnnnnnnnnnnnnnnnnnnnnnnnnnnnnnnnnnnnnnnnnnnnnnnnnnnnnnnnnnnnnnnnnnnnnnnnnnnnnnnnnnnnnnnnnnnnnnnnnnnnnnnnnnnnnnnnnnnnnnnnnnnnnnnnnnnnnnnnnnnnnnnnnnnnnnnnnnnnnnnnnnnnnnnnnnnnnnnnnnnnnnnnnnnnnnnnnnnnnnnnnnnnnnnnnnnnnnnnnnnnnnnnnnnnnnnnnnnnnnnnnnnnnnnnnnnnnnnnnnnnnnnnnnnnnnnnnnnnnnnnnnnnnnnnnnnnnnnnnnnnnnnnnnnnnnnnnnnnnnnnnnnnnnnnnnnnnnnnnnnnnnnnnnnnnnnnnnnnnnnnnnnnnnnnnnnnnnnnnnnnnnnnnnnnnnnnnnnnnnnnnnnnnnnnnnnnnnnnnnnnnnnnnnnnnnnnnnnnnnnnnnnnnnnnnnnnnnnnnnnnnnnnnnnnnnnnnnnnnnnnnnnnnnnnnnnnnnnnnnnnnnnnnnnnnnnnnnnnnnnnnnnnnnnnnnnnnnnnnnnnnnnnnnnnnnnnnnnnnnnnnnnnnnnnnnnnnnnnnnnnnnnnnnnnnnnnnnnnnnnnnnnnnnnnnnnnnnnnnnnnnnnnnnnnnnnnnnnnnnnnnnnnnnnnnnnnnnnnnnnnnnnnnnnnnnnnnnnnnnnnnnnnnnnnnnnnnnnnnnnnnnnnnnnnnnnnnnnnnnnnnnnnnnnnnnnnnnnnnnnnnnnnnnnnnnnnnnnnnnnnnnnnnnnnnnnnnnnnnnnnnnnnnnnnnnnnnnnnnnnnnnnnnnnnnnnnnnnnnnnnnnnnnnnnnnnnnnnnnnnnnnnnnnnnnnnnnnnnnnnnnnnnnnnnnnnnnnnnnnnnnnnnnnnnnnnnnnnnnnnnnnnnnnnnnnnnnnnnnnnnnnnnnnnnnnnnnnnnnnnnnnnnnnnnnnnnnnnnnnnnnnnnnnnnnnnnnnnnnnnnnnnnnnnnnnnnnnnnnnnnnnnnnnnnnnnnnnnnnnnnnnnnnnnnnnnnnnnnnnnnnnnnnnnnnnnnnnnnnnnnnnnnnnnnnnnnnnnnnnnnnnnnnnnnnnnnnnnnnnnnnnnnnnnnnnnnnnnnnnnnnnnnnnnnnnnnnnnnnnnnnnnnnnnnnnnnnnnnnnnnnnnnnnnnnnnnnnnnnnnnnnnnnnnnnnnnnnnnnnnnnnnnnnnnnnnnnnnnnnnnnnnnnnnnnnnnnnnnnnnnnnnnnnnnnnnnnnnnnnnnnnnnnnnnnnnnnnnnnnnnnnnnnnnnnnnnnnnnnnnnnnnnnnnnnnnnnnnnnnnnnnnnnnnnnnnnnnnnnnnnnnnnnnnnnnnnnnnnnnnnnnnnnnnnnnnnnnnnnnnnnnnnnnnnnnnnnnnnnnnnnnnnnnnnnnnnnnnnnnnnnnnnnnnnnnnnnnnnnnnnnnnnnnnnnnnnnnnnnnnnnnnnnnnnnnnnnnnnnnnnnnnnnnnnnnnnnnnnnnnnnnnnnnnnnnnnnnnnnnnnnnnnnnnnnnnnnnnnnnnnnnnnnnnnnnnnnnnnnnnnnnnnnnnnnnnnnnnnnnnnnnnnnnnnnnnnnnnnnnnnnnnnnnnnnnnnnnnnnnnnnnnnnnnnnnnnnnnnnnnnnnnnnnnnnnnnnnnnnnnnnnnnnnnnnnnnnnnnnnnnnnnnnnnnnnnnnnnnnnnnnnnnnnnnnnnnnnnnnnnnnnnnnnnnnnnnnnnnnnnnnnnnnnnnnnnnnnnnnnnnnnnnnnnnnnnnnnnnnnnnnnnnnnnnnnnnnnnnnnnnnnnnnnnnnnnnnnnnnnnnnnnnnnnnnnnnnnnnnnnnnnnnnnnnnnnnnnnnnnnnnnnnnnnnnnnnnnnnnnnnnnnnnnnnnnnnnnnnnnnnnnnnnnnnnnnnnnnnnnnnnnnnnnnnnnnnnnnnnnnnnnnnnnnnnnnnnnnnnnnnnnnnnnnnnnnnnnnnnnnnnnnnnnnnnnnnnnnnnnnnnnnnnnnnnnnnnnnnnnnnnnnnnnnnnnnnnnnnnnnnnnnnnnnnnnnnnnnnnnnnnnnnnnnnnnnnnnnnnnnnnnnnnnnnnnnnnnnnnnnnnnnnnnnnnnnnnnnnnnnnnnnnnnnnnnnnnnnnnnnnnnnnnnnnnnnnnnnnnnnnnnnnnnnnnnnnnnnnnnnnnnnnnnnnnnnnnnnnnnnnnnnnnnnnnnnnnnnnnnnnnnnnnnnnnnnnnnnnnnnnnnnnnnnnnnnnnnnnnnnnnnnnnnnnnnnnnnnnnnnnnnnnnnnnnnnnnnnnnnnnnnnnnnnnnnnnnnnnnnnnnnnnnnnnnnnnnnnnnnnnnnnnnnnnnnnnnnnnnnnnnnnnnnnnnnnnnnnnnnnnnnnnnnnnnnnnnnnnnnnnnnnnnnnnnnnnnnnnnnnnnnnnnnnnnnnnnnnnnnnnnnnnnnnnnnnnnnnnnnnnnnnnnnnnnnnnnnnnnnnnnnnnnnnnnnnnnnnnnnnnnnnnnnnnnnnnnnnnnnnnnnnnnnnnnnnnnnnnnnnnnnnnnnnnnnnnnnnnnnnnnnnnnnnnnnnnnnnnnnnnnnnnnnnnnnnnnnnnnnnnnnnnnnnnnnnnnnnnnnnnnnnnnnnnnnnnnnnnnnnnnnnnnnnnnnnnnnnnnnnnnnnnnnnnnnnnnnnnnnnnnnnnnnnnnnnnnnnnnnnnnnnnnnnnnnnnnnnnnnnnnnnnnnnnnnnnnnnnnnnnnnnnnnnnnnnnnnnnnnnnnnnnnnnnnnnnnnnnnnnnnnnnnnnnnnnnnnnnnnnnnnnnnnnnnnnnnnnnnnnnnnnnnnnnnnnnnnnnnnnnnnnnnnnnnnnnnnnnnnnnnnnnnnnnnnnnnnnnnnnnnnnnnnnnnnnnnnnnnnnnnnnnnnnnnnnnnnnnnnnnnnnnnnnnnnnnnnnnnnnnnnnnnnnnnnnnnnnnnnnnnnnnnnnnnnnnnnnnnnnnnnnnnnnnnnnnnnnnnnnnnnnnnnnnnnnnnnnnnnnnnnnnnnnnnnnnnnnnnnnnnnnnnnnnnnnnnnnnnnnnnnnnnnnnnnnnnnnnnnnnnnnnnnnnnnnnnnnnnnnnnnnnnnnnnnnnnnnnnnnnnnnnnnnnnnnnnnnnnnnnnnnnnnnnnnnnnnnnnnnnnnnnnnnnnnnnnnnnnnnnnnnnnnnnnnnnnnnnnnnnnnnnnnnnnnnnnnnnnnnnnnnnnnnnnnnnnnnnnnnnnnnnnnnnnnnnnnnnnnnnnnnnnnnnnnnnnnnnnnnnnnnnnnnnnnnnnnnnnnnnnnnnnnnnnnnnnnnnnnnnnnnnnnnnnnnnnnnnnnnnnnnnnnnnnnnnnnnnnnnnnnnnnnnnnnnnnnnnnnnnnnnnnnnnnnnnnnnnnnnnnnnnnnnnnnnnnnnnnnnnnnnnnnnnnnnnnnnnnnnnnnnnnnnnnnnnnnnnnnnnnnnnnnnnnnnnnnnnnnnnnnnnnnnnnnnnnnnnnnnnnnnnnnnnnnnnnnnnnnnnnnnnnnnnnnnnnnnnnnnnnnnnnnnnnnnnnnnnnnnnnnnnnnnnnnnnnnnnnnnnnnnnnnnnnnnnnnnnnnnnnnnnnnnnnnnnnnnnnnnnnnnnnnnnnnnnnnnnnnnnnnnnnnnnnnnnnnnnnnnnnnnnnnnnnnnnnnnnnnnnnnnnnnnnnnnnnnnnnnnnnnnnnnnnnnnnnnnnnnnnnnnnnnnnnnnnnnnnnnnnnnnnnnnnnnnnnnnnnnnnnnnnnnnnnnnnnnnnnnnnnnnnnnnnnnnnnnnnnnnnnnnnnnnnnnnnnnnnnnnnnnnnnnnnnnnnnnnnnnnnnnnnnnnnnnnnnnnnnnnnnnnnnnnnnnnnnnnnnnnnnnnnnnnnnnnnnnnnnnnnnnnnnnnnnnnnnnnnnnnnnnnnnnnnnnnnnnnnnnnnnnnnnnnnnnnnnnnnnnnnnnnnnnnnnnnnnnnnnnnnnnnnnnnnnnnnnnnnnnnnnnnnnnnnnnnnnnnnnnnnnnnnnnnnnnnnnnnnnnnnnnnnnnnnnnnnnnnnnnnnnnnnnnnnnnnnnnnnnnnnnnnnnnnnnnnnnnnnnnnnnnnnnnnnnnnnnnnnnnnnnnnnnnnnnnnnnnnnnnnnnnnnnnnnnnnnnnnnnnnnnnnnnnnnnnnnnnnnnnnnnnnnnnnnnnnnnnnnnnnnnnnnnnnnnnnnnnnnnnnnnnnnnnnnnnnnnnnnnnnnnnnnnnnnnnnnnnnnnnnnnnnnnnnnnnnnnnnnnnnnnnnnnnnnnnnnnnnnnnnnnnnnnnnnnnnnnnnnnnnnnnnnnnnnnnnnnnnnnnnnnnnnnnnnnnnnnnnnnnnnnnnnnnnnnnnnnnnnnnnnnnnnnnnnnnnnnnnnnnnnnnnnnnnnnnnnnnnnnnnnnnnnnnnnnnnnnnnnnnnnnnnnnnnnnnnnnnnnnnnnnnnnnnnnnnnnnnnnnnnnnnnnnnnnnnnnnnnnnnnnnnnnnnnnnnnnnnnnnnnnnnnnnnnnnnnnnnnnnnnnnnnnnnnnnnnnnnnnnnnnnnnnnnnnnnnnnnnnnnnnnnnnnnnnnnnnnnnnnnnnnnnnnnnnnnnnnnnnnnnnnnnnnnnnnnnnnnnnnnnnnnnnnnnnnnnnnnnnnnnnnnnnnnnnnnnnnnnnnnnnnnnnnnnnnnnnnnnnnnnnnnnnnnnnnnnnnnnnnnnnnnnnnnnnnnnnnnnnnnnnnnnnnnnnnnnnnnnnnnnnnnnnnnnnnnnnnnnnnnnnnnnnnnnnnnnnnnnnnnnnnnnnnnnnnnnnnnnnnnnnnnnnnnnnnnnnnnnnnnnnnnnnnnnnnnnnnnnnnnnnnnnnnnnnnnnnnnnnnnnnnnnnnnnnnnnnnnnnnnnnnnnnnnnnnnnnnnnnnnnnnnnnnnnnnnnnnnnnnnnnnnnnnnnnnnnnnnnnnnnnnnnnnnnnnnnnnnnnnnnnnnnnnnnnnnnnnnnnnnnnnnnnnnnnnnnnnnnnnnnnnnnnnnnnnnnnnnnnnnnnnnnnnnnnnnnnnnnnnnnnnnnnnnnnnnnnnnnnnnnnnnnnnnnnnnnnnnnnnnnnnnnnnnnnnnnnnnnnnnnnnnnnnnnnnnnnnnnnnnnnnnnnnnnnnnnnnnnnnnnnnnnnnnnnnnnnnnnnnnnnnnnnnnnnnnnnnnnnnnnnnnnnnnnnnnnnnnnnnnnnnnnnnnnnnnnnnnnnnnnnnnnnnnnnnnnnnnnnnnnnnnnnnnnnnnnnnnnnnnnnnnnnnnnnnnnnnnnnnnnnnnnnnnnnnnnnnnnnnnnnnnnnnnnnnnnnnnnnnnnnnnnnnnnnnnnnnnnnnnnnnnnnnnnnnnnnnnnnnnnnnnnnnnnnnnnnnnnnnnnnnnnnnnnnnnnnnnnnnnnnnnnnnnnnnnnnnnnnnnnnnnnnnnnnnnnnnnnnnnnnnnnnnnnnnnnnnnnnnnnnnnnnnnnnnnnnnnnnnnnnnnnnnnnnnnnnnnnnnnnnnnnnnnnnnnnnnnnnnnnnnnnnnnnnnnnnnnnnnnnnnnnnnnnnnnnnnnnnnnnnnnnnnnnnnnnnnnnnnnnnnnnnnnnnnnnnnnnnnnnnnnnnnnnnnnnnnnnnnnnnnnnnnnnnnnnnnnnnnnnnnnnnnnnnnnnnnnnnnnnnnnnnnnnnnnnnnnnnnnnnnnnnnnnnnnnnnnnnnnnnnnnnnnnnnnnnnnnnnnnnnnnnnnnnnnnnnnnnnnnnnnnnnnnnnnnnnnnnnnnnnnnnnnnnnnnnnnnnnnnnnnnnnnnnnnnnnnnnnnnnnnnnnnnnnnnnnnnnnnnnnnnnnnnnnnnnnnnnnnnnnnnnnnnnnnnnnnnnnnnnnnnnnnnnnnnnnnnnnnnnnnnnnnnnnnnnnnnnnnnnnnnnnnnnnnnnnnnnnnnnnnnnnnnnnnnnnnnnnnnnnnnnnnnnnnnnnnnnnnnnnnnnnnnnnnnnnnnnnnnnnnnnnnnnnnnnnnnnnnnnnnnnnnnnnnnnnnnnnnnnnnnnnnnnnnnnnnnnnnnnnnnnnnnnnnnnnnnnnnnnnnnnnnnnnnnnnnnnnnnnnnnnnnnnnnnnnnnnnnnnnnnnnnnnnnnnnnnnnnnnnnnnnnnnnnnnnnnnnnnnnnnnnnnnnnnnnnnnnnnnnnnnnnnnnnnnnnnnnnnnnnnnnnnnnnnnnnnnnnnnnnnnnnnnnnnnnnnnnnnnnnnnnnnnnnnnnnnnnnnnnnnnnnnnnnnnnnnnnnnnnnnnnnnnnnnnnnnnnnnnnnnnnnnnnnnnnnnnnnnnnnnnnnnnnnnnnnnnnnnnnnnnnnnnnnnnnnnnnnnnnnnnnnnnnnnnnnnnnnnnnnnnnnnnnnnnnnnnnnnnnnnnnnnnnnnnnnnnnnnnnnnnnnnnnnnnnnnnnnnnnnnnnnnnnnnnnnnnnnnnnnnnnnnnnnnnnnnnnnnnnnnnnnnnnnnnnnnnnnnnnnnnnnnnnnnnnnnnnnnnnnnnnnnnnnnnnnnnnnnnnnnnnnnnnnnnnnnnnnnnnnnnnnnnnnnnnnnnnnnnnnnnnnnnnnnnnnnnnnnnnnnnnnnnnnnnnnnnnnnnnnnnnnnnnnnnnnnnnnnnnnnnnnnnnnnnnnnnnnnnnnnnnnnnnnnnnnnnnnnnnnnnnnnnnnnnnnnnnnnnnnnnnnnnnnnnnnnnnnnnnnnnnnnnnnnnnnnnnnnnnnnnnnnnnnnnnnnnnnnnnnnnnnnnnnnnnnnnnnnnnnnnnnnnnnnnnnnnnnnnnnnnnnnnnnnnnnnnnnnnnnnnnnnnnnnnnnnnnnnnnnnnnnnnnnnnnnnnnnnnnnnnnnnnnnnnnnnnnnnnnnnnnnnnnnnnnnnnnnnnnnnnnnnnnnnnnnnnnnnnnnnnnnnnnnnnnnnnnnnnnnnnnnnnnnnnnnnnnnnnnnnnnnnnnnnnnnnnnnnnnnnnnnnnnnnnnnnnnnnnnnnnnnnnnnnnnnnnnnnnnnnnnnnnnnnnnnnnnnnnnnnnnnnnnnnnnnnnnnnnnnnnnnnnnnnnnnnnnnnnnnnnnnnnnnnnnnnnnnnnnnnnnnnnnnnnnnnnnnnnnnnnnnnnnnnnnnnnnnnnnnnnnnnnnnnnnnnnnnnnnnnnnnnnnnnnnnnnnnnnnnnnnnnnnnnnnnnnnnnnnnnnnnnnnnnnnnnnnnnnnnnnnnnnnnnnnnnnnnnnnnnnnnnnnnnnnnnnnnnnnnnnnnnnnnnnnnnnnnnnnnnnnnnnnnnnnnnnnnnnnnnnnnnnnnnnnnnnnnnnnnnnnnnnnnnnnnnnnnnnnnnnnnnnnnnnnnnnnnnnnnnnnnnnnnnnnnnnnnnnnnnnnnnnnnnnnnnnnnnnnnnnnnnnnnnnnnnnnnnnnnnnnnnnnnnnnnnnnnnnnnnnnnnnnnnnnnnnnnnnnnnnnnnnnnnnnnnnnnnnnnnnnnnnnnnnnnnnnnnnnnnnnnnnnnnnnnnnnnnnnnnnnnnnnnnnnnnnnnnnnnnnnnnnnnnnnnnnnnnnnnnnnnnnnnnnnnnnnnnnnnnnnnnnnnnnnnnnnnnnnnnnnnnnnnnnnnnnnnnnnnnnnnnnnnnnnnnnnnnnnnnnnnnnnnnnnnnnnnnnnnnnnnnnnnnnnnnnnnnnnnnnnnnnnnnnnnnnnnnnnnnnnnnnnnnnnnnnnnnnnnnnnnnnnnnnnnnnnnnnnnnnnnnnnnnnnnnnnnnnnnnnnnnnnnnnnnnnnnnnnnnnnnnnnnnnnnnnnnnnnnnnnnnnnnnnnnnnnnnnnnnnnnnnnnnnnnnnnnnnnnnnnnnnnnnnnnnnnnnnnnnnnnnnnnnnnnnnnnnnnnnnnnnnnnnnnnnnnnnnnnnnnnnnnnnnnnnnnnnnnnnnnnnnnnnnnnnnnnnnnnnnnnnnnnnnnnnnnnnnnnnnnnnnnnnnnnnnnnnnnnnnnnnnnnnnnnnnnnnnnnnnnnnnnnnnnnnnnnnnnnnnnnnnnnnnnnnnnnnnnnnnnnnnnnnnnnnnnnnnnnnnnnnnnnnnnnnnnnnnnnnnnnnnnnnnnnnnnnnnnnnnnnnnnnnnnnnnnnnnnnnnnnnnnnnnnnnnnnnnnnnnnnnnnnnnnnnnnnnnnnnnnnnnnnnnnnnnnnnnnnnnnnnnnnnnnnnnnnnnnnnnnnnnnnnnnnnnnnnnnnnnnnnnnnnnnnnnnnnnnnnnnnnnnnnnnnnnnnnnnnnnnnnnnnnnnnnnnnnnnnnnnnnnnnnnnnnnnnnnnnnnnnnnnnnnnnnnnnnnnnnnnnnnnnnnnnnnnnnnnnnnnnnnnnnnnnnnnnnnnnnnnnnnnnnnnnnnnnnnnnnnnnnnnnnnnnnnnnnnnnnnnnnnnnnnnnnnnnnnnnnnnnnnnnnnnnnnnnnnnnnnnnnnnnnnnnnnnnnnnnnnnnnnnnnnnnnnnnnnnnnnnnnnnnnnnnnnnnnnnnnnnnnnnnnnnnnnnnnnnnnnnnnnnnnnnnnnnnnnnnnnnnnnnnnnnnnnnnnnnnnnnnnnnnnnnnnnnnnnnnnnnnnnnnnnnnnnnnnnnnnnnnnnnnnnnnnnnnnnnnnnnnnnnnnnnnnnnnnnnnnnnnnnnnnnnnnnnnnnnnnnnnnnnnnnnnnnnnnnnnnnnnnnnnnnnnnnnnnnnnnnnnnnnnnnnnnnnnnnnnnnnnnnnnnnnnnnnnnnnnnnnnnnnnnnnnnnnnnnnnnnnnnnnnnnnnnnnnnnnnnnnnnnnnnnnnnnnnnnnnnnnnnnnnnnnnnnnnnnnnnnnnnnnnnnnnnnnnnnnnnnnnnnnnnnnnnnnnnnnnnnnnnnnnnnnnnnnnnnnnnnnnnnnnnnnnnnnnnnnnnnnnnnnnnnnnnnnnnnnnnnnnnnnnnnnnnnnnnnnnnnnnnnnnnnnnnnnnnnnnnnnnnnnnnnnnnnnnnnnnnnnnnnnnnnnnnnnnnnnnnnnnnnnnnnnnnnnnnnnnnnnnnnnnnnnnnnnnnnnnnnnnnnnnnnnnnnnnnnnnnnnnnnnnnnnnnnnnnnnnnnnnnnnnnnnnnnnnnnnnnnnnnnnnnnnnnnnnnnnnnnnnnnnnnnnnnnnnnnnnnnnnnnnnnnnnnnnnnnnnnnnnnnnnnnnnnnnnnnnnnnnnnnnnnnnnnnnnnnnnnnnnnnnnnnnnnnnnnnnnnnnnnnnnnnnnnnnnnnnnnnnnnnnnnnnnnnnnnnnnnnnnnnnnnnnnnnnnnnnnnnnnnnnnnnnnnnnnnnnnnnnnnnnnnnnnnnnnnnnnnnnnnnnnnnnnnnnnnnnnnnnnnnnnnnnnnnnnnnnnnnnnnnnnnnnnnnnnnnnnnnnnnnnnnnnnnnnnnnnnnnnnnnnnnnnnnnnnnnnnnnnnnnnnnnnnnnnnnnnnnnnnnnnnnnnnnnnnnnnnnnnnnnnnnnnnnnnnnnnnnnnnnnnnnnnnnnnnnnnnnnnnnnnnnnnnnnnnnnnnnnnnnnnnnnnnnnnnnnnnnnnnnnnnnnnnnnnnnnnnnnnnnnnnnnnnnnnnnnnnnnnnnnnnnnnnnnnnnnnnnnnnnnnnnnnnnnnnnnnnnnnnnnnnnnnnnnnnnnnnnnnnnnnnnnnnnnnnnnnnnnnnnnnnnnnnnnnnnnnnnnnnnnnnnnnnnnnnnnnnnnnnnnnnnnnnnnnnnnnnnnnnnnnnnnnnnnnnnnnnnnnnnnnnnnnnnnnnnnnnnnnnnnnnnnnnnnnnnnnnnnnnnnnnnnnnnnnnnnnnnnnnnnnnnnnnnnnnnnnnnnnnnnnnnnnnnnnnnnnnnnnnnnnnnnnnnnnnnnnnnnnnnnnnnnnnnnnnnnnnnnnnnnnnnnnnnnnnnnnnnnnnnnnnnnnnnnnnnnnnnnnnnnnnnnnnnnnnnnnnnnnnnnnnnnnnnnnnnnnnnnnnnnnnnnnnnnnnnnnnnnnnnnnnnnnnnnnnnnnnnnnnnnnnnnnnnnnnnnnnnnnnnnnnnnnnnnnnnnnnnnnnnnnnnnnnnnnnnnnnnnnnnnnnnnnnnnnnnnnnnnnnnnnnnnnnnnnnnnnnnnnnnnnnnnnnnnnnnnnnnnnnnnnnnnnnnnnnnnnnnnnnnnnnnnnnnnnnnnnnnnnnnnnnnnnnnnnnnnnnnnnnnnnnnnnnnnnnnnnnnnnnnnnnnnnnnnnnnnnnnnnnnnnnnnnnnnnnnnnnnnnnnnnnnnnnnnnnnnnnnnnnnnnnnnnnnnnnnnnnnnnnnnnnnnnnnnnnnnnnnnnnnnnnnnnnnnnnnnnnnnnnnnnnnnnnnnnnnnnnnnnnnnnnnnnnnnnnnnnnnnnnnnnnnnnnnnnnnnnnnnnnnnnnnnnnnnnnnnnnnnnnnnnnnnnnnnnnnnnnnnnnnnnnnnnnnnnnnnnnnnnnnnnnnnnnnnnnnnnnnnnnnnnnnnnnnnnnnnnnnnnnnnnnnnnnnnnnnnnnnnnnnnnnnnnnnnnnnnnnnnnnnnnnnnnnnnnnnnnnnnnnnnnnnnnnnnnnnnnnnnnnnnnnnnnnnnnnnnnnnnnnnnnnnnnnnnnnnnnnnnnnnnnnnnnnnnnnnnnnnnnnnnnnnnnnnnnnnnnnnnnnnnnnnnnnnnnnnnnnnnnnnnnnnnnnnnnnnnnnnnnnnnnnnnnnnnnnnnnnnnnnnnnnnnnnnnnnnnnnnnnnnnnnnnnnnnnnnnnnnnnnnnnnnnnnnnnnnnnnnnnnnnnnnnnnnnnnnnnnnnnnnnnnnnnnnnnnnnnnnnnnnnnnnnnnnnnnnnnnnnnnnnnnnnnnnnnnnnnnnnnnnnnnnnnnnnnnnnnnnnnnnnnnnnnnnnnnnnnnnnnnnnnnnnnnnnnnnnnnnnnnnnnnnnnnnnnnnnnnnnnnnnnnnnnnnnnnnnnnnnnnnnnnnnnnnnnnnnnnnnnnnnnnnnnnnnnnnnnnnnnnnnnnnnnnnnnnnnnnnnnnnnnnnnnnnnnnnnnnnnnnnnnnnnnnnnnnnnnnnnnnnnnnnnnnnnnnnnnnnnnnnnnnnnnnnnnnnnnnnnnnnnnnnnnnnnnnnnnnnnnnnnnnnnnnnnnnnnnnnnnnnnnnnnnnnnnnnnnnnnnnnnnnnnnnnnnnnnnnnnnnnnnnnnnnnnnnnnnnnnnnnnnnnnnnnnnnnnnnnnnnnnnnnnnnnnnnnnnnnnnnnnnnnnnnnnnnnnnnnnnnnnnnnnnnnnnnnnnnnnnnnnnnnnnnnnnnnnnnnnnnnnnnnnnnnnnnnnnnnnnnnnnnnnnnnnnnnnnnnnnnnnnnnnnnnnnnnnnnnnnnnnnnnnnnnnnnnnnnnnnnnnnnnnnnnnnnnnnnnnnnnnnnnnnnnnnnnnnnnnnnnnnnnnnnnnnnnnnnnnnnnnnnnnnnnnnnnnnnnnnnnnnnnnnnnnnnnnnnnnnnnnnnnnnnnnnnnnnnnnnnnnnnnnnnnnnnnnnnnnnnnnnnnnnnnnnnnnnnnnnnnnnnnnnnnnnnnnnnnnnnnnnnnnnnnnnnnnnnnnnnnnnnnnnnnnnnnnnnnnnnnnnnnnnnnnnnnnnnnnnnnnnnnnnnnnnnnnnnnnnnnnnnnnnnnnnnnnnnnnnnnnnnnnnnnnnnnnnnnnnnnnnnnnnnnnnnnnnnnnnnnnnnnnnnnnnnnnnnnnnnnnnnnnnnnnnnnnnnnnnnnnnnnnnnnnnnnnnnnnnnnnnnnnnnnnnnnnnnnnnnnnnnnnnnnnnnnnnnnnnnnnnnnnnnnnnnnnnnnnnnnnnnnnnnnnnnnnnnnnnnnnnnnnnnnnnnnnnnnnnnnnnnnnnnnnnnnnnnnnnnnnnnnnnnnnnnnnnnnnnnnnnnnnnnnnnnnnnnnnnnnnnnnnnnnnnnnnnnnnnnnnnnnnnnnnnnnnnnnnnnnnnnnnnnnnnnnnnnnnnnnnnnnnnnnnnnnnnnnnnnnnnnnnnnnnnnnnnnnnnnnnnnnnnnnnnnnnnnnnnnnnnnnnnnnnnnnnnnnnnnnnnnnnnnnnnnnnnnnnnnnnnnnnnnnnnnnnnnnnnnnnnnnnnnnnnnnnnnnnnnnnnnnnnnnnnnnnnnnnnnnnnnnnnnnnnnnnnnnnnnnnnnnnnnnnnnnnnnnnnnnnnnnnnnnnnnnnnnnnnnnnnnnnnnnnnnnnnnnnnnnnnnnnnnnnnnnnnnnnnnnnnnnnnnnnnnnnnnnnnnnnnnnnnnnnnnnnnnnnnnnnnnnnnnnnnnnnnnnnnnnnnnnnnnnnnnnnnnnnnnnnnnnnnnnnnnnnnnnnnnnnnnnnnnnnnnnnnnnnnnnnnnnnnnnnnnnnnnnnnnnnnnnnnnnnnnnnnnnnnnnnnnnnnnnnnnnnnnnnnnnnnnnnnnnnnnnnnnnnnnnnnnnnnnnnnnnnnnnnnnnnnnnnnnnnnnnnnnnnnnnnnnnnnnnnnnnnnnnnnnnnnnnnnnnnnnnnnnnnnnnnnnnnnnnnnnnnnnnnnnnnnnnnnnnnnnnnnnnnnnnnnnnnnnnnnnnnnnnnnnnnnnnnnnnnnnnnnnnnnnnnnnnnnnnnnnnnnnnnnnnnnnnnnnnnnnnnnnnnnnnnnnnnnnnnnnnnnnnnnnnnnnnnnnnnnnnnnnnnnnnnnnnnnnnnnnnnnnnnnnnnnnnnnnnnnnnnnnnnnnnnnnnnnnnnnnnnnnnnnnnnnnnnnnnnnnnnnnnnnnnnnnnnnnnnnnnnnnnnnnnnnnnnnnnnnnnnnnnnnnnnnnnnnnnnnnnnnnnnnnnnnnnnnnnnnnnnnnnnnnnnnnnnnnnnnnnnnnnnnnnnnnnnnnnnnnnnnnnnnnnnnnnnnnnnnnnnnnnnnnnnnnnnnnnnnnnnnnnnnnnnnnnnnnnnnnnnnnnnnnnnnnnnnnnnnnnnnnnnnnnnnnnnnnnnnnnnnnnnnnnnnnnnnnnnnnnnnnnnnnnnnnnnnnnnnnnnnnnnnnnnnnnnnnnnnnnnnnnnnnnnnnnnnnnnnnnnnnnnnnnnnnnnnnnnnnnnnnnnnnnnnnnnnnnnnnnnnnnnnnnnnnnnnnnnnnnnnnnnnnnnnnnnnnnnnnnnnnnnnnnnnnnnnnnnnnnnnnnnnnnnnnnnnnnnnnnnnnnnnnnnnnnnnnnnnnnnnnnnnnnnnnnnnnnnnnnnnnnnnnnnnnnnnnnnnnnnnnnnnnnnnnnnnnnnnnnnnnnnnnnnnnnnnnnnnnnnnnnnnnnnnnnnnnnnnnnnnnnnnnnnnnnnnnnnnnnnnnnnnnnnnnnnnnnnnnnnnnnnnnnnnnnnnnnnnnnnnnnnnnnnnnnnnnnnnnnnnnnnnnnnnnnnnnnnnnnnnnnnnnnnnnnnnnnnnnnnnnnnnnnnnnnnnnnnnnnnnnnnnnnnnnnnnnnnnnnnnnnnnnnnnnnnnnnnnnnnnnnnnnnnnnnnnnnnnnnnnnnnnnnnnnnnnnnnnnnnnnnnnnnnnnnnnnnnnnnnnnnnnnnnnnnnnnnnnnnnnnnnnnnnnnnnnnnnnnnnnnnnnnnnnnnnnnnnnnnnnnnnnnnnnnnnnnnnnnnnnnnnnnnnnnnnnnnnnnnnnnnnnnnnnnnnnnnnnnnnnnnnnnnnnnnnnnnnnnnnnnnnnnnnnnnnnnnnnnnnnnnnnnnnnnnnnnnnnnnnnnnnnnnnnnnnnnnnnnnnnnnnnnnnnnnnnnnnnnnnnnnnnnnnnnnnnnnnnnnnnnnnnnnnnnnnnnnnnnnnnnnnnnnnnnnnnnnnnnnnnnnnnnnnnnnnnnnnnnnnnnnnnnnnnnnnnnnnnnnnnnnnnnnnnnnnnnnnnnnnnnnnnnnnnnnnnnnnnnnnnnnnnnnnnnnnnnnnnnnnnnnnnnnnnnnnnnnnnnnnnnnnnnnnnnnnnnnnnnnnnnnnnnnnnnnnnnnnnnnnnnnnnnnnnnnnnnnnnnnnnnnnnnnnnnnnnnnnnnnnnnnnnnnnnnnnnnnnnnnnnnnnnnnnnnnnnnnnnnnnnnnnnnnnnnnnnnnnnnnnnnnnnnnnnnnnnnnnnnnnnnnnnnnnnnnnnnnnnnnnnnnnnnnnnnnnnnnnnnnnnnnnnnnnnnnnnnnnnnnnnnnnnnnnnnnnnnnnnnnnnnnnnnnnnnnnnnnnnnnnnnnnnnnnnnnnnnnnnnnnnnnnnnnnnnnnnnnnnnnnnnnnnnnnnnnnnnnnnnnnnnnnnnnnnnnnnnnnnnnnnnnnnnnnnnnnnnnnnnnnnnnnnnnnnnnnnnnnnnnnnnnnnnnnnnnnnnnnnnnnnnnnnnnnnnnnnnnnnnnnnnnnnnnnnnnnnnnnnnnnnnnnnnnnnnnnnnnnnnnnnnnnnnnnnnnnnnnnnnnnnnnnnnnnnnnnnnnnnnnnnnnnnnnnnnnnnnnnnnnnnnnnnnnnnnnnnnnnnnnnnnnnnnnnnnnnnnnnnnnnnnnnnnnnnnnnnnnnnnnnnnnnnnnnnnnnnnnnnnnnnnnnnnnnnnnnnnnnnnnnnnnnnnnnnnnnnnnnnnnnnnnnnnnnnnnnnnnnnnnnnnnnnnnnnnnnnnnnnnnnnnnnnnnnnnnnnnnnnnnnnnnnnnnnnnnnnnnnnnnnnnnnnnnnnnnnnnnnnnnnnnnnnnnnnnnnnnnnnnnnnnnnnnnnnnnnnnnnnnnnnnnnnnnnnnnnnnnnnnnnnnnnnnnnnnnnnnnnnnnnnnnnnnnnnnnnnnnnnnnnnnnnnnnnnnnnnnnnnnnnnnnnnnnnnnnnnnnnnnnnnnnnnnnnnnnnnnnnnnnnnnnnnnnnnnnnnnnnnnnnnnnnnnnnnnnnnnnnnnnnnnnnnnnnnnnnnnnnnnnnnnnnnnnnnnnnnnnnnnnnnnnnnnnnnnnnnnnnnnnnnnnnnnnnnnnnnnnnnnnnnnnnnnnnnnnnnnnnnnnnnnnnnnnnnnnnnnnnnnnnnnnnnnnnnnnnnnnnnnnnnnnnnnnnnnnnnnnnnnnnnnnnnnnnnnnnnnnnnnnnnnnnnnnnnnnnnnnnnnnnnnnnnnnnnnnnnnnnnnnnnnnnnnnnnnnnnnnnnnnnnnnnnnnnnnnnnnnnnnnnnnnnnnnnnnnnnnnnnnnnnnnnnnnnnnnnnnnnnnnnnnnnnnnnnnnnnnnnnnnnnnnnnnnnnnnnnnnnnnnnnnnnnnnnnnnnnnnnnnnnnnnnnnnnnnnnnnnnnnnnnnnnnnnnnnnnnnnnnnnnnnnnnnnnnnnnnnnnnnnnnnnnnnnnnnnnnnnnnnnnnnnnnnnnnnnnnnnnnnnnnnnnnnnnnnnnnnnnnnnnnnnnnnnnnnnnnnnnnnnnnnnnnnnnnnnnnnnnnnnnnnnnnnnnnnnnnnnnnnnnnnnnnnnnnnnnnnnnnnnnnnnnnnnnnnnnnnnnnnnnnnnnnnnnnnnnnnnnnnnnnnnnnnnnnnnnnnnnnnnnnnnnnnnnnnnnnnnnnnnnnnnnnnnnnnnnnnnnnnnnnnnnnnnnnnnnnnnnnnnnnnnnnnnnnnnnnnnnnnnnnnnnnnnnnnnnnnnnnnnnnnnnnnnnnnnnnnnnnnnnnnnnnnnnnnnnnnnnnnnnnnnnnnnnnnnnnnnnnnnnnnnnnnnnnnnnnnnnnnnnnnnnnnnnnnnnnnnnnnnnnnnnnnnnnnnnnnnnnnnnnnnnnnnnnnnnnnnnnnnnnnnnnnnnnnnnnnnnnnnnnnnnnnnnnnnnnnnnnnnnnnnnnnnnnnnnnnnnnnnnnnnnnnnnnnnnnnnnnnnnnnnnnnnnnnnnnnnnnnnnnnnnnnnnnnnnnnnnnnnnnnnnnnnnnnnnnnnnnnnnnnnnnnnnnnnnnnnnnnnnnnnnnnnnnnnnnnnnnnnnnnnnnnnnnnnnnnnnnnnnnnnnnnnnnnnnnnnnnnnnnnnnnnnnnnnnnnnnnnnnnnnnnnnnnnnnnnnnnnnnnnnnnnnnnnnnnnnnnnnnnnnnnnnnnnnnnnnnnnnnnnnnnnnnnnnnnnnnnnnnnnnnnnnnnnnnnnnnnnnnnnnnnnnnnnnnnnnnnnnnnnnnnnnnnnnnnnnnnnnnnnnnnnnnnnnnnnnnnnnnnnnnnnnnnnnnnnnnnnnnnnnnnnnnnnnnnnnnnnnnnnnnnnnnnnnnnnnnnnnnnnnnnnnnnnnnnnnnnnnnnnnnnnnnnnnnnnnnnnnnnnnnnnnnnnnnnnnnnnnnnnnnnnnnnnnnnnnnnnnnnnnnnnnnnnnnnnnnnnnnnnnnnnnnnnnnnnnnnnnnnnnnnnnnnnnnnnnnnnnnnnnnnnnnnnnnnnnnnnnnnnnnnnnnnnnnnnnnnnnnnnnnnnnnnnnnnnnnnnnnnnnnnnnnnnnnnnnnnnnnnnnnnnnnnnnnnnnnnnnnnnnnnnnnnnnnnnnnnnnnnnnnnnnnnnnnnnnnnnnnnnnnnnnnnnnnnnnnnnnnnnnnnnnnnnnnnnnnnnnnnnnnnnnnnnnnnnnnnnnnnnnnnnnnnnnnnnnnnnnnnnnnnnnnnnnnnnnnnnnnnnnnnnnnnnnnnnnnnnnnnnnnnnnnnnnnnnnnnnnnnnnnnnnnnnnnnnnnnnnnnnnnnnnnnnnnnnnnnnnnnnnnnnnnnnnnnnnnnnnnnnnnnnnnnnnnnnnnnnnnnnnnnnnnnnnnnnnnnnnnnnnnnnnnnnnnnnnnnnnnnnnnnnnnnnnnnnnnnnnnnnnnnnnnnnnnnnnnnnnnnnnnnnnnnnnnnnnnnnnnnnnnnnnnnnnnnnnnnnnnnnnnnnnnnnnnnnnnnnnnnnnnnnnnnnnnnnnnnnnnnnnnnnnnnnnnnnnnnnnnnnnnnnnnnnnnnnnnnnnnnnnnnnnnnnnnnnnnnnnnnnnnnnnnnnnnnnnnnnnnnnnnnnnnnnnnnnnnnnnnnnnnnnnnnnnnnnnnnnnnnnnnnnnnnnnnnnnnnnnnnnnnnnnnnnnnnnnnnnnnnnnnnnnnnnnnnnnnnnnnnnnnnnnnnnnnnnnnnnnnnnnnnnnnnnnnnnnnnnnnnnnnnnnnnnnnnnnnnnnnnnnnnnnnnnnnnnnnnnnnnnnnnnnnnnnnnnnnnnnnnnnnnnnnnnnnnnnnnnnnnnnnnnnnnnnnnnnnnnnnnnnnnnnnnnnnnnnnnnnnnnnnnnnnnnnnnnnnnnnnnnnnnnnnnnnnnnnnnnnnnnnnnnnnnnnnnnnnnnnnnnnnnnnnnnnnnnnnnnnnnnnnnnnnnnnnnnnnnnnnnnnnnnnnnnnnnnnnnnnnnnnnnnnnnnnnnnnnnnnnnnnnnnnnnnnnnnnnnnnnnnnnnnnnnnnnnnnnnnnnnnnnnnnnnnnnnnnnnnnnnnnnnnnnnnnnnnnnnnnnnnnnnnnnnnnnnnnnnnnnnnnnnnnnnnnnnnnnnnnnnnnnnnnnnnnnnnnnnnnnnnnnnnnnnnnnnnnnnnnnnnnnnnnnnnnnnnnnnnnnnnnnnnnnnnnnnnnnnnnnnnnnnnnnnnnnnnnnnnnnnnnnnnnnnnnnnnnnnnnnnnnnnnnnnnnnnnnnnnnnnnnnnnnnnnnnnnnnnnnnnnnnnnnnnnnnnnnnnnnnnnnnnnnnnnnnnnnnnnnnnnnnnnnnnnnnnnnnnnnnnnnnnnnnnnnnnnnnnnnnnnnnnnnnnnnnnnnnnnnnnnnnnnnnnnnnnnnnnnnnnnnnnnnnnnnnnnnnnnnnnnnnnnnnnnnnnnnnnnnnnnnnnnnnnnnnnnnnnnnnnnnnnnnnnnnnnnnnnnnnnnnnnnnnnnnnnnnnnnnnnnnnnnnnnnnnnnnnnnnnnnnnnnnnnnnnnnnnnnnnnnnnnnnnnnnnnnnnnnnnnnnnnnnnnnnnnnnnnnnnnnnnnnnnnnnnnnnnnnnnnnnnnnnnnnnnnnnnnnnnnnnnnnnnnnnnnnnnnnnnnnnnnnnnnnnnnnnnnnnnnnnnnnnnnnnnnnnnnnnnnnnnnnnnnnnnnnnnnnnnnnnnnnnnnnnnnnnnnnnnnnnnnnnnnnnnnnnnnnnnnnnnnnnnnnnnnnnnnnnnnnnnnnnnnnnnnnnnnnnnnnnnnnnnnnnnnnnnnnnnnnnnnnnnnnnnnnnnnnnnnnnnnnnnnnnnnnnnnnnnnnnnnnnnnnnnnnnnnnnnnnnnnnnnnnnnnnnnnnnnnnnnnnnnnnnnnnnnnnnnnnnnnnnnnnnnnnnnnnnnnnnnnnnnnnnnnnnnnnnnnnnnnnnnnnnnnnnnnnnnnnnnnnnnnnnnnnnnnnnnnnnnnnnnnnnnnnnnnnnnnnnnnnnnnnnnnnnnnnnnnnnnnnnnnnnnnnnnnnnnnnnnnnnnnnnnnnnnnnnnnnnnnnnnnnnnnnnnnnnnnnnnnnnnnnnnnnnnnnnnnnnnnnnnnnnnnnnnnnnnnnnnnnnnnnnnnnnnnnnnnnnnnnnnnnnnnnnnnnnnnnnnnnnnnnnnnnnnnnnnnnnnnnnnnnnnnnnnnnnnnnnnnnnnnnnnnnnnnnnnnnnnnnnnnnnnnnnnnnnnnnnnnnnnnnnnnnnnnnnnnnnnnngatagccttatagtatatctttataatactatatcttctaatactatctataagctaaagagtaatctctcagctactatataagtagattttatacctattaatcgcctttactaagtagggtattccttttatatcttctagattctcctttacctatctttagctaataaaggtttaggtagccctactattaattagaattctagtaacccctattagggcacccttataaatatctaagataagtatattatatactaatatactttagcccttctactaaccctccctaaggattactcctagtactaccgcggcctatagtatagggttatctatttttttagttcctttaagttattcttctaaagctacttagcttttaggtaaacccttataatatatctagcttccttatataagtaatataagtcctttacctagttatctaattttactctctagtcttacttcctcttattaaaggataataactattcctttcggctatcctataaggtagatagttcttagccttagtctaataacttcttactattatcttttaagtctatattcctattctacctatataagtactacttagcctatagctttataatatataaaggtatctagctctctataaagctaaggtaggctacttatttattatagatctctatcttagataggtcctactattaggctttagtttaaatctcttttaaaatacctatctctaggtagttaatatatacctaatctaataatatagagtataagtagttatagatccctattagatattaggtatattaatatatactctattctagcttttatatagcttactactaattagcttttactttatactataactatactaagtctataacttaggttaaggcctaagttttgaatatatcctatataatctactttataggattattcttttaatattatatctaaccttaggtaaccttatttaagaggaattctattatttatataacccttactttatctaaggcgaactattataggtatcttacttaaaatacttcttattttaccttaaatatatcttacttatctatagttttactatagaatactagtatattaaataggctttatagctccctaacttaggagattttactactttatactatacctatattattattacagtcccctactactattaggaaagattagggtatcgctaatatccttaatatagggtttaggggttctagtacctaggtagtatctcccttaagtagtagtagatatagtatacttaattcctcctctaaggtaatagctgtaagattctaattataaaggtataataagagtttagctttttagtcggtaattataagccgttttttaagggccttaaggtcttactatttagctataagccttcttttattttctctaatatccttatcggaggattctatcggttaggcggccccctcttctataggaatagctctttcggtaggtatagcccctatcttagtagggatttataaatcctatatttagttttcttagctagtaggtagggatatatctccctataatacctagcttctactataggtattttaaggtatcttataggttctagtagtctaatttataaaataaagtaattagaatattaggactagctaccagtatatcctaaaaatagaggttcgaattagagtaaaggtccctagcgtaggtcatataattcagtagactaatcgctaaggttctaaatctcatatacacagtatatatatacccctggcgcttacttagtaagtacatcggcccatataggccagttgtgtaagtgaccctcagggtcataacaaatattgactttattatagggttaccccctataaagtagtaggataaggtctataatatacttataattatagttaatatagaggactaggtcctaataaagaatatatatattaacttaagaaaaccttataagaaactagactactattatataggacccttttaggttataagagtagtagggaaataagcctactaattaatcctactacctaggtattataggatatatcctatataatatatatctttattaaaaccctttaaaggtaacctataaataggctaagagagattagaccctattatagttaatagagaattagaatatattatagaatatattcttaaaagctactataaagaggtagagtatctaattaaatagaaaggctataaagatattaagaatatataggaaccttaggtatatatagaagaaattactatattagattaatttaaaaaagaagagtatataagactatctataaaaactaaaagggggtaacctataaagaagaagaagataagctaagattataaagatactataagaagtagtatatattagtaggaatatgtcagaatctaggatgaatactgtcatttttcatccctgatacagttggatcacgtgactnnnnnnnnnnnnnnnnnnnnnnnnnnnnnnnnnnnnnnnnnnnnnnnnnnnnnnnnnnnnnnnnnnnnnnnnnnnnnnnnnnnnnnnnnnnnnnnnnnnnnnnnnnnnnnnnnnnnnnnnnnnnnnnnnnnnnnnnnnnnnnnnnnnnnnnnnnnnnnnnnnnnnnnnnnnnnnnnnnnnnnnnnnnnnnnnnnnnnnnnnnnnnnnnnnnnnnnnnnnnnnnnnnnnnnnnnnnnnnnnnnnnnnnnnnnnnnnnnnnnnnnnnnnnnnnnnnnnnnnnnnnnnnnnnnnnnnnnnnnnnnnnnnnnnnnnnnnnnnnnnnnnnnnnnnnnnnnnnnnnnnnnnnnnnnnnnnnnnnnnnnnnnnnnnnnnnnnnnnnnnnnnnnnnnnnnnnnnnnnnnnnnnnnnnnnnnnnnnnnnnnnnnnnnnnnnnnnnnnnnnnnnnnnnnnnnnnnnnnnnnnnnnnnnnnnnnnnnnnnnnnnnnnnnnnnnnnnnnnnnnnnnnnnnnnnnnnnnnnnnnnnnnnnnnnnnnnnnnnnnnnnnnnnnnnnnnnnnnnnnnnnnnnnnnnnnnnnnnnnnnnnnnnnnnnnnnnnnnnnnnnnnnnnnnnnnnnnnnnnnnnnnnnnnnnnnnnnnnnnnnnnnnnnnnnnnnnnnnnnnnnnnnnnnnnnnnnnnnnnnnnnnnnnnnnnnnnnnnnnnnnnnnnnnnnnnnnnnnnnnnnnnnnnnnnnnnnnnnnnnnnnnnnnnnnnnnnnnnnnnnnnnnnnnnnnnnnnnnnnnnnnnnnnnnnnnnnnnnnnnnnnnnnnnnnnnnnnnnnnnnnnnnnnnnnnnnnnnnnnnnnnnnnnnnnnnnnnnnnnnnnnnnnnnnnnnnnnnnnnnnnnnnnnnnnnnnnnnnnnnnnnnnnnnnnnnnnnnnnnnnnnnnnnnnnnnnnnnnnnnnnnnnnnnnnnnnnnnnnnnnnnnnnnnnnnnnnnnnnnnnnnnnnnnnnnnnnnnnnnnnnnnnnnnnnnnnnnnnnnnnnnnnnnnnnnnnnnnnnnnnnnnnnnnnnnnnnnnnnnnnnnnnnnnnnnnnnnnnnnnnnnnnnnnnnnnnnnnnnnnnnnnnnnnnnnnnnnnnnnnnnnnnnnnnnnnnnnnnnnnnnnnnnnnnnnnnnnnnnnnnnnnnnnnnnnnnnnnnnnnnnnnnnnnnnnnnnnnnnnnnnnnnnnnnnnnnnnnnnnnnnnnnnnnnnnnnnnnnnnnnnnnnnnnnnnnnnnnnnnnnnnnnnnnnnnnnnnnnnnnnnnnnnnnnnnnnnnnnnnnnnnnnnnnnnnnnnnnnnnnnnnnnnnnnnnnnnnnnnnnnnnnnnnnnnnnnnnnnnnnnnnnnnnnnnnnnnnnnnnnnnnnnnnnnnnnnnnnnnnnnnnnnnnnnnnnnnnnnnnnnnnnnnnnnnnnnnnnnnnnnnnnnnnnnnnnnnnnnnnnnnnnnnnnnnnnnnnnnnnnnnnnnnnnnnnnnnnnnnnnnnnnnnnnnnnnnnnnnnnnnnnnnnnnnnnnnnnnnnnnnnnnnnnnnnnnnnnnnnnnnnnnnnnnnnnnnnnnnnnnnnnnnnnnnnnnnnnnnnnnnnnnnnnnnnnnnnnnnnnnnnnnnnnnnnnnnnnnnnnnnnnnnnnnnnnnnnnnnnnnnnnnnnnnnnnnnnnnnnnnnnnnnnnnnnnnnnnnnnnnnnnnnnnnnnnnnnnnnnnnnnnnnnnnnnnnnnnnnnnnnnnnnnnnnnnnnnnnnnnnnnnnnnnnnnnnnnnnnnnnnnnnnnnnnnnnnnnnnnnnnnnnnnnnnnnnnnnnnnnnnnnnnnnnnnnnnnnnnnnnnnnnnnnnnnnnnnnnnnnnnnnnnnnnnnnnnnnnnnnnnnnnnnnnnnnnnnnnnnnnnnnnnnnnnnnnnnnnnnnnnnnnnnnnnnnnnnnnnnnnnnnnnnnnnnnnnnnnnnnnnnnnnnnnnnnnnnnnnnnnnnnnnnnnnnnnnnnnnnnnnnnnnnnnnnnnnnnnnnnnnnnnnnnnnnnnnnnnncaaaggaaatactaagagcttcgaggatatagcttataaaggaggggggtaatattacaaccccgagggttacttatacaactagcctatataggccgatatatttactaagtaagcgctaggggtatatatataccgtatatatgagatttagaaccttagcgattagtctactgaattgtatgacctacgctagggacctctactctaattcgaacctccattttcaggatacgctggtagctagtcctaacaggctatatcaatagcatcgaccgggcgcttttgcggtagaggacgcgagggagtaccttcttctatatcacagatagcaatcactgcattgattacagtaattcggcgttcagtttctttctcgactatcttccctggtatcgtcaagatactatcgataagcgtcatatactgcagtgtcatatagcctgtacactatagcgcccctataacttctttgttaacaacttttccggaaagttaccgcttactatcaatcaccggctactcattcttgtaccgcttaagattttcacaaatcaatcggtacttttaccatctcacaaatcaatcagtgcttttgccatcccttttcgtttcgtagttactttactacacgattatactactcgtctgtataatcaaatttctggtataactttttgatacctttctcttaagccttctaccgcttacagagtattcgggaataagggctactccgcggtaggttatcgccgaactcctactgtaatatagcctaggtatctttataggtacgcttctgtaacggataaaggtccgtacaagagggaaacacatgtaaacctgcacaggctcgggaaggaacatctatgtcatcatacatctgtttcgatgtcgatccgtacatctttgctattaaaaggggtttttagggtgaaattctaacttaaatcgctaccctggcttagggggggggttagcgtttaaagataaatattgagttttaaaagtacccgattaggtaaaaaaggtattaaaccagctactaagaagctatttttaattgtctccgatttaaaggctttaatttatatagaggggtatactttaaggaattcaagtttattaatatagttaatcctagtctatatttttattttaactaaccggctgtataactgttttactactataaaataaccgatattgagaggttataaaaggtaagaggaatatagtagtatataaattagtataatattattttactcgtaaatttaatcgaattaaggggttaaatagcttctatagctattaagtactaaaagtcgataccttcctactatatataataaagttaatagtataaagagtttctaaagctagcgaagtctaattttattagaagtctaactgtttagactaactttaaaccgctaatcgctaggaaggcctttaaactatgatttaaggaagaccttacctttaaaaataatatatagagggagggcctaccctactgcgtttatatattcaattgcagttacctacttataatttctaggttataaaagtgatctctaactatagtatttacttcttattataacctttactattatagttaatcctattataaatctagtcttatcgaagttatagatattatctagattaattctaaattaaagaatggttttttaaataagattaaactattctctaatgatttttagatctttacatttcgcatacttataattataatatcttaagaaccaagaagaaagaagagggtatcgttttataaaattataaacctatttttcgctaactaaaagaactagggtagttctacactatttaagaagaagattcgccatttctcatactatagagggccggggggctactctataagaatctatagagagaatccatttttgaagagaattctccttagtttctatcaatttctgtaaatttgtgtacgtagtacttcgttaagaacggccagagaggcagtcgcgtaaagttatacgcgggacatcaaaagtatatgtagtaagagtaatcgagctgatatctttattttgaagagcctggatagctaataaaagcctaccctcttactgttctaatttactagcggattgagagcgctttggtggcatggtgggtggttgaactaactaggtactgattcatggacgcgtttttgggtggggtggcgactcgtttacagtggcgactcgtttacagtggcgactcgtttaccgattacgttatgggcctaacgaatgactaatctacaatctgttcttagcgcatctttccggcactgtagatattccggtaaccgaattaccacaggcctgttcattccgacaggaaccaagcatattggcctcaacattatgacgtcacatgataaatctatctgtaaggccgacatcaactctggcagttttgacatcttggacgtttgaggcaagatcttgacatgattaatttcaacagcccagtatttcacgtgctcgctcgttactaccgataagtccctggaccctggctctggactccccaatcatgtccagtcttcacgagctccttcaccgacagcgaccaggacgacggcaagaattccgcgcccggccttgtgtcttcctcgcaaaaatgctttatggttggtacgagcctattccagctacgccactcacaaaacctatcgcggttgtctgtatttccgatacccacaacacccaaaccgacgtccatgatggagacatcctcatccatgctggtgatctcacacaatctggatcttttcaggaacttcaagattcgatcacctggctacgaagcctacctcatcctaccaaaattgtgattgctggcaatcatgacctactacttgattcagcgcgggatgatgtgtctggtcgagcagcctccgagcgagctcaaatcgactggggagatataatctacctcgaaaacgaggaagtaacaatttattgcccaaatggtcgtcaactgagggtctacggaagtccctactcttgccgccatggcaactgggcctttcaatatccccggaatcaagatgtatgggctggctcagtaccagatggaattgatgtgctaattactcatggtccaccacttgctcatcttgacttactgaagtatggctgttcttatttgctacagaccttatggagaattcggccaaggctacatgtattcggccatatacatgagggttcaggaactgagttaatgctgttcgacaggctccaggaggcgtatgagggaactgtcgccgctggagggggcttgaaaaatctactgtttacagcctgggagtttgctaaggaagtcctacgcccagccgtggaagcaaaatgtttacttgtaaatcctgccattgttggagggttacgggataatgaacgaaggttgcctatcaaagtttttatctaattttacaatcttgctgaccaactatattgaatcccacctgtgcaactgtgctatgcatgcttccgtgcccctattatatggactcgtcatttcttctctgcacatggtgatgaatttctcgctttttgagggtatacttatctgtccgatgaatcaccgtgatatgtatcccgatttgtattcatgatagctacttaaataaacaaacccgctgcaataatatcactggatactgaggtaaaacttagtgtgcctttctcctcctaatttttggcatcgcaaacaaagaaaggttctcggaaaggttagctagaccgcagggaaagtacggaggagatagtacgaggttattgctttatttttcaagcctaaagtctctactggtatctcattcctgtgctcaatgtgaagaatcatgtgatatgcgcgactgaacaagggttataggaacacgctgccccaggctacatgctgtttctctaaagtagttgtttccctaaagtagttccgtatgctcctgccaaaatgaattcgagtatccacgaatgactggagatacacgagtcgactggaagctggtagatctgtattcaaaacttccacgttgattaaaatgggtcagtcgctgtccactctccgctggcgtcgcagtgctcgtagcctacaagagctagccgctcgaccagccgcgatacgcgacctgagtccgaatctgtcttgtgaaattctcatttctgccctcgagaatgttgccaaatacacttcagccaagaaccaagacatcactctcgttgtcgttggtggaatcatcaatacaatcttcctcagaagtcgccctgaaactcatgatgtcgattttttcaatgacaatcttccacccgccacgctcaggtgcctttcgaaggcagccaagtccgctttcaaaaggaatcgtatactcggacgggggtggctcaacaaccatgttgttctcttcgtcccatcccatatacgacgtattctcctcgatgaagcgcttgagcagcacgaagttgtttttcaagcccctggacttactctcttagctgctccttgggaattccttttttgtaccaagttgcatcgactgtctggaagaggtgttagcaccgcaacgtcttatgatcaggaggacgcggttcattacttggagaagtacatttcacttcaatctaccgccgctgtagcccagggaactgttaggttttggtttggacagtatttacttgattggaccacagaaacagaggagctgctcccgggtgtgaactccatgtaccagaccacttttcatgttgagcatgatccaatcattcttagttcttaattcttgccttgattgatctcaatacatattgattactcacggtctagctaatctcctgattccagggaagaggtccaaccactcggatgttccaagtttcaactgcgcatcaagttttacggtcttagtcgaaatgaacctctacgtgatgggcataaatagacgattaagtatgtggaatcaagagatgatctcattagctagctagacgtatgaagtaatacgccgcgctaaacctagagagtagatgtcaaacttagaagcgtatttcgtagtacctctccgatatggtgtagtggctaacatcgtcgtctctcacgcgacagccgggagtttcttttgccggcagcggcagcgtaaatagttagcactccgaggcaacctgctgattgactaattagtcactcttcaatctacaggtattgggcccgagtcccaaagttgaaaccctaaattaaggacaagtgtgatgatgaaatagaactatccaagagcagataccgctatttatagtcaacgtcgctgcctaataagcagctacttctacccgtgaccgcccgaacgaacaggagctccgagagctagttcgtcggagtgatagtcacgtataggtctcgcctaagctatagggcaatctagtgggttgcctccgttagccacgataaccctgacacttgaggtaatacatgtaactacatactcgtgattttccccctcaattttagaccgctatttctaagaatctgactgattagatacttttagctacgggaagtgtccgtcccacccaggtgtatggtggatcccaatcattcaatgccatcaaccctctgcgtattctcggtcggtagatgcgtatgttgactatcccaaatcaatcttcgacccctagagcatatacacaatttccggatgaagatcaaccagaagatcaacgactcctgccaagtggccaccgaaatcatttggtagattgtattgacgtatttgtcaaatatacgatcttgataagctaataataatgatatttacttaatatatcgggctttttgatgatcactttagcgaacgggaagaagataagaggttaaataagagaagatgaatactaccataggaagctagataattcactactgcgcattaagatatagaacgaaacgcgaggaatgatgctatctacctgaagcttttagtagatcttacaaactagcgaatatacggaaaagagaatcgaagtgatatatagatatatccgtggaagttgaccgctgttaaagggtcgtttctacgagctacttgctggtgagatcctatacagcgaaccttctgggcccaaacctaacgatccgaataccatcaaagctcaaatcctcctgtgacgatctaggaaggatcgtacttgccaaacgaggcaggaacagtcacgtcctcgtacttgccaaacgggaattaagcgaagacaaacgcgagggtataagaagggaagaacgcgcactcagatagtttctctttttcctttctcctccgtacttagaatttggttgaattacactcctttcttctgaatcgaattggctcgtaacacctccgacaacataaggcagaccataaatttgaagacaccttgaataaatttggttatataatacttccagttgtggttacgtgcacatgccaagatgccgagcgtttcagagggaacggaacgatccaatgacattcggttattgttcagccgaagaggtcagtgcagtggtcgcgcgacttgggtgattctcaccctgattctcaccctgtctatagcgcactcatctttatcacccccgatcgcgcgaccgtaaagcggcgctcacccatttctcacccgggcgacacccacccaactattgactgcatataagccacacgtcggtgagttagtagttgggtgggtgaccaccagcgaatcctcactgttgtatgtttttcttccttttttgcacctgaattagatcagaccaatcactcgcactcgatggtttttttttaagactatgtatgtattgaagaggggaccctgggataggggcaccgacagccctgcctgcgaaacaggtgtgagagcagagtcgtcactgggagtagtagggtgctagagaggagaacacaatggggtaactactgagaagtgaaagtggaaaggtgtctgcgttgctatctccgcctctggggtgcttttatatcacatgaccgcctagtcatcctgctctggaaacccccacgtgcagtatggatgtagttagtggaatgtagtcgcttgtaactttcttcaatcacgaaaacggctgtctccactggtacaggaggcagtctgtggttggccatgtctaccctaattgggatcctttctgtttatttttctcgaggctatctttcatccaaggtctaagtagtccaagctgatcagccagatttcgggtataccccatacatatcacgtgatgcgcttccccacggctttcctattccggccttccccgcacttctgcatatccatctcgcaccccgagcatttcggatagccacggttaagggctatgcggaactggtatggcaatcccggctctttaaaatggcgtttctccccgttttgggtttcctgaattcaagcgattcagcgttgttctcccccttggacttggaattgtgaacccgtcaatcattattctctaagcgtataacactcatcacctaccatttgtcttcggcatcagacagcaaattacattgatcaagaaaatgagtcttcgaacagccgtgtctctcccgcgcagggcgacttgtttctctgcgtccgcagtgaacgcccgacgctggccgtccagcaaggcccgagccttttccacaactacgcaacgcgatgcgacgtgggggtttatcgggctaggacagatgggtatgttttgagatcggccgcgaggacctcgggtatacaacctcggctatacaatggactgtgggatgttgtttccaactgcattatctaactacattaggctaccatatggccaaaaacctgcgcgccaagatccccgcatccgataccttgatcgtgcgcgatgtcaacgaagatgttatgaaacgattcgttgcagaggctcgggaggccgcacaaaacaatggcgcaggcgtcaatgaaggccaagtcgagatcgcgaagagtgcgcgcgaggtcgccgagaaatcggtgagtggctaccacccctacgggttcagcctgtggctgagctagtggcttctctgcataaaccgcgcttcatatacttgtgtccttctagggtctgataaatatgcttatctctgtctgccgtttagatagtcatggttaccagtctcccagagtctcaacatgtcattgaggtgtttcattctatccttaaagatggagcgctgccaccgctcgagcaggagcgtctcttcatcgacgcatcgaccattgaccccgtcacatctaaggatatcgcaaacgccatccacaccacgcaaaccggccgattcgtggatgcccctgtatcgggaggtgttgtcggtgctcaggcaggaacgttgtcattcatgtttggcgcctcttcacaatcaagcgagctgcttgaacgcatccgcagtgtcctcgctttgatgggtaaaaaagcttggcatcttggtgagcccggcgctggcgtgtctggcaagctcgccaataactacattctggctctgaacaatatcgccactgctgaggctatgaacctcggtgttcgctggggactcgaccctaaggcgttggctgaaatgatcaattcgtctactggtcgttgctggccctctgaggttaacaatcccgttcctggtgtcgttgagacagcccccgcatcccgtggatatgagggcggattcggggtgagccttatgcacaaggatcttcgtttggctcttgcggctgcggagcagtctaatactcctctcgccctgggtgctcaggctcgtgaggtgtacaaggctgtcgaggaggagtatcgtggtaaggatttctcggtggtttataagtggttgcaggagaagtctcaataagttctcctcattttaggtgaagtttcctgggtatttttcctttcgatgtctcccccgactcagtacctgctgctctttctcatagatgtggatttcaggatataaaattacaatatagcattcttctactcaatggaattgagtctaggatttccattttgtgtttctacatcttcagagcatatacaatattcaatatcaatggttgatgttctgcagctttcaggtacacgggatatagttgtctctcgccccatgtgacttccctttctctttcccccccaaacacgccaacgcccctcatagctccttctcttcctattcttacgctctttccttatccgacatctgccattctttcttcttgcgtctcctcccatcctctcattccacctccatcctattccttcatccccctatccctccatttactctgccatcggtcctgtcctggcccatttatccccttgtcgatttcaaggtcatccagactttcattccgtatacctcatccccacctacctcttccttcgtttcgagttatcatcagacgccttgtagcctgaacagacggaaggttgcatcctcgacaacaagtaagtcttccactcaattttgccatgtcctactagcctaccggtcctcgttctggctgacactggcacacttggatagcagctagactttcttctcagaattgtctatataatttggtgcaggaactcaggtgagtttcctgcggttggcactatgccattgaggaattttgtcaaatggaggctaaaggggctgcccatcaagccttcttcttgtctgccaattccaaagaatcagctgacaaaatccttctctttcagcatacgcccttcgtcatgcaccctcagggctctcaacacacaagctcctctggttctggctcttgtcagacatcaagctcccagtctgcacaatacccccaagagcctcgtacaccctatggtcccaggtaccaccaatctaccaatccgagttctattgacagcagtggtgcaggcctgaccaatcttttcagaggattaaatctgcagaactctcgtcccaaattcaacggctcaaagggcaccgcacccgttcaaatgaacacaaacatggactggtcgaataccaaccgtgcatacaacagcccattcatcctggttccgaattccaccgttttcaatggcgttccgaccgtctcttcctttgttcctaacggtgtctctggtcagactgatcagatgggccaattctcgtatcttccaacgggagtctaccccaacgtcaatcctgtgatggctggtggatactcgtcgtggccctacatgatgaactacgacatgcaggatgggacgaccaacaagcaagcatgggtgtctgagggccagaagggagttcagggggagaacaatggacaaataaattactatccctctgctcttgtttctggcatggatggcagttccatgtctggttactcttatggaggcatggttccctcgcagcttgggtcgctctcgcttcccctccaaatgatgaagactcccaacggttacgtcgttcaagatctggaggctctaactcaacaagatcctgccatcccacgcgcggtgcctgccatgtggactaacccgtctgagctgacactcgccaagtgtctggaaaatcgcgagggtataaccaatgtctacatccgaggattcctgcccgagaccactgatgagatgttgcatgcctacgcagctcgtttcggaaagattgagcgttgcaaggccatcgtggacctggataccagtctttgcaaagggtacctactccacaaaacttctttccgataatttattctaatcttttgcagattcggttttgttcagtattacagcttcgaatcctgcgagaactgcattcgcggtttcttttacctcggctaccaagccagcttcgcccagaagtctcgcaactctcgcctgaaggatctggaggacaagtcttctaccaatatatactgcaccaacattccaatcgattggactgaagccgtgagttatacaaacccccacacgcttgtctgtcctgttgaattctaattagtttatcaggacctgcgtcgtcatttcgagccatggcgtgtggtttcggaaaagatcagtcgcgatgagaagacaggtgtgagcaaggaagtgggctttgcacggtaaaaaagcaaattccttccttgactctcatgaccttttctgactggtttacagcttcgaaaaccgtgatgttgccgaaaaggtcctgatggaattccacaacgtcaccaaggacgatggggtaaagctgcttctgcgctttgctgataccaaagcgcaaaagatcctgaagcaacagagcaacgaacgtcgtgcttaccgcgccggagaatataactactcggttgaagtggttcagggatctactccatcccctgggatgaaacgtggctctcatcttactccaaactctcaagtcagctatacctctccagctggtgtgggcgctaactggaccccggcaacttccatctccccttggtatgtctaaatacttgaactgcattccaaaactcattctaatcgagctcacagtcacccgcacatgaagaatccatccagcagtgcacgaagcagttccttgtcgtctcggagcctcaatgctcttgaccacacgcccgcctatcgcagtcgagccttgtccctgaaccgcggctcttacactgatctctctggtggttcttccaagaccgccatgccggactcgccgactatggggtctcgtaaagagaacatcagagcgggctctgtatcccccgcttcttcttctcccatgatcattctctccccagctcgctcgtgcacttaaaccagccgtgcaacgtgctcccacgcatatatgtatttgcatgggatgctttacatcatcttatcactcggggtaagatgatcagcacctctccagggtgctctccaatatccaaatgcgcagcatctgttaccattcgcagaatgtatcgacgatgtatagctcagccttgcttttttatgattgttctacgattcacgattcatgattcacgatatgatattcggttgctttctgtttacgacccttcgtggcatttttagatgactctacgcggtatcattatggagttcgatctgcatttttatcaagtttcatgggaggatgggaaaagctttttttctttctttcgcagttatatggactttacatgttttcagcatatgtgacagacaagatgcatgtttcaagacttcgttcaaagaacgctatcgcaccttattgggttgcgcagtctaatatgatattattcaagatgaaaaatactccatgtaaggtccatgttcaagatccaaagtgcgtgagcacaattgtgacgtggagggcaatctatccgaaaaggctaatgagataggaatctcgatctacacaggtaagacaatccacattattcgggtcaattgcgcccaagtctctcctccagatcctcggtgagctgataagcaggaagatactgtccatcaagctgagccccaagccgcaatctcggattaggatgggtatcagacgtgccaccaagactagtatatccctcgtcataaagcgaacagtacttcaaatccagatgccgaatgaacgcccagatctccgcataatgccaatcaatcatgggatgcacgcgtacgaaatccggccaccccccgtccgtccgatcaaagtgcgtcagctgtgtgccatgcggatccgtccgccgcgtaccaacaaatatcgcccggatcccagggtggtgcgccagataatcctcaaagctcgagcggagcgtcgaagccggcggcgcagtcgtgtactttgcaatatcgagatgataagctttagcggaggagatgacgaagtcttcgacttcatcgaagggatcaggtgggagggcataaatcgccgggatgaccttcgccgcggctatctgggcttcggtgtcgaggtctgcgggggagggggttgtatcggttgtgtttgcatttgcggtggggtgtgggtcattgccggcatggattggatgcaacccggccagaaacagaattagcaggactagacagtccttgccgccgttgtaggagacggatagttccgagagcttgtatcgctgcagcgcggtgctgactacttctagggagatgcgcgtctgccgttgcacggaggccagcagcgtgtccggggcgtggggttcgtttaggaaggcttgtacgcgggcgtggatgcgtgagatcacggtggggagaggaggaattgtttcatcgctggttgagtcgttgaggggttgtttgttgctgtgaggtgttccattctggttcggctcgggctcttggttgggaggggctgatggtttcaatggttcggatgttgctggtggtagtggtgggaatggttgaaggtgatcttgcggccggaaaggcgcatgttttggagttgtttcagtcatgcttgtgttgaggtgaggttgacggagcgaggtttggggcggggtgtgggtttctcggggagacacaacttaatccactgcggggatacaaagccgatgtcaagcatgtgtagacatactctatgtatacatagatctagataattgaaggtcgatataaaccaatttgggaacttcccggaacccccgcgcctcaccgcggttcctcggtggaactcggtagattctcgtggatctggataccgcgaacagcctaggcatatatgattcatgatacaatttactgaatgcaccttgaaaaaatgcttaattgcggccgtggccgtgacaattcataagtagatccctagacgccggtaacgctcagaagggaaaaaaaaattaaagtcaaatcagcccaacaccttcatcttcttcttcttcttcttctcatcaccaccaggtttgcgccccttctggaaatcccgccagctaccaatgcgctcttcgcgcgtctcctcccacttcttgtcattttcgcgcttgcgcttgcgtgcctcgagctcttcttcttccttgcgttgctcacgaccttcctcctgcaaacgtgccttgagctgtcgccggcgtcgcgcttcttcatccaatagcacgctgattgtcttcttccgccactcaaccttgaactcctcggttttaagctcgggggagtcgagtgtgtacttgtgttcacgaatcaacaggcggcgcgcatcggagatacattcgtccaggtattcgcgttgcttctcgtctagaagagcttcctgtgccttattgaggcgatcgaaggcatctggagcagcggggttcttggtcttgtcggggtggatcaggagggagatcttgcggtattggactttgatgtctttttctgtaacaccgggttggaggtccaggacggcgtagctgcagtgggttagtgtatgtaaaatatatagaggggcattattctattgtagatattaagattagacgtacgaatcgagcttgaatgccgagcgaatgcgatcgatctcaacatcctgtgtcgcgtgtcagtcgcaatctagatgtataccatgtggaggagggcatacctttttaaactcggaggcctctttctctagagcttcgagaaattcctggtctggctcgtcgtccgacatattgccttctgcggattcttttgaggtaggaatgttcttgcgctcaagagagtacgacctcaaaaaagataagacagcgggcttatcggtcgctgagtcagcgcccggggccccccccccggcccccccggcccacaacaaaaaaagaagnnnnnnnnnnnnnnnnnnnnnnnnnnnnnnnnnnnnnnnnnnnnnnnnnnnnnnnnnnnnnnnnnnnnnnnnnnnnnnnnnnnnnnnnnnnnnnnnnnnnnnnnnnnnnnnnnnnnnnnnnnnnnnnnnnnnnnnnnnnnnnnnnnnnnnnnnnnnnnnnnnnnnnnnnnnnnnnnnnnnnnnnnnnnnnnnnnnnnnnnnnnnnnnnnnnnnnnnnnnnnnnnnnnnnnnnnnncgcgggggccccgctgccggacctggcagcaacatacaagagtagcagtctccttgtctctctcattagcgaagactatcattgtcatgtacaaacatctagtcggccaaaaatcatattagatattccatccaagacacgattacaaataagctgaagacatcaaaatatctagtagttattagatatcagagctccttaccgctttccctaccgcctttgtttttcgctcccaagaagaaaaaaaagatgttttcaccgcccgctactttcaagattcaactcaaaccacatcatggcgccacgagcagttaaagggaagtcaaagcctcaccaggagacaggaagggtcttgaaacgaaagcgtggcgaggatagcttagctacactcatcaagcaggtcgaggacctcgacctcaaaacccccgtcaaaaacttctccgatctcccactctccgaaccaacagccaaaggcctcgcagcctctcattttaaaactcttaccgacattcaatcgcgtgctatcaatcatgcgttcaagggacgcgatatcctcggtgccgccaaaaccggtagcggaaagaccctcgcctttctagtgcccatcctcgagaatctttatcgcaagaagtggactgagttggatggtctcggtgcactcgttctctcgcctacgcgtgaactagcaatccagattttcgaggtgcttcgcaagatcgggcgataccataatttctccgctggattgattatcggcggaaagagtttgcgcgaggaacaagatcgtttaggacgcatgaacattttggtttgcacacccggccgcatgttgcagcatttggatcagacagctatgttcgagacgaataacctgcagatgctggtgctggacgaagccgatcgtatcatggatatgggtttccagaagactgtcgatgctatcctcgaccatctccccaaacagcgccagactatgcttttcagtgccacacagaccaagaaggtcggtgatttggctcgtttgagtctgcaggaacctgagtatgtctcggtccatgaatcagccgcctccgccactccctccactctccaacaacactacaccgttactccactcccgcagaagcttgacaccctttggagtttcattcgcagcaacctaaaatctaagacggtggtcttcttgtcatcaggcaagcaagttcgctacgtatacgaatcactaagacaattgcagcctggtatttccttgctccatttgcacgggcggcagaaacagggtggacgattggatattaccactaagttctctcaggctcaacacgctgtccttttcgctaccgatgttgttgctcgtggtctggatttccctgctgtcgattgggttatccaaatggactgccccgaagacgccgatacctatattcaccgtgtcggacggacggctcgttacgagcgtgttggtcgtgcggtgctcttcctagaccctagcgaggagaagggattcctcaagcagctcgagcacaggaaagttccgattgaaaatatcaatatcaaatcgaacaagcagcagagtatcaagaaccagctgcagaatatgtgtttcaaggatccagagctgaaatacctgggccagaaagccttcatctcctacgtcaagtcgatttacgtgcaaaaggacaaggagacctttaagatcaaggagcttccgttggaagagtatgcagccagtctgggtcttcccggtgctccgcgtattaagttcatcaagggtgacgatgcgaaggagcggaagaacgaatcttggcgaatggcacaaatgtccgatgatgactcagacgcaaagacgaaggataagaaggacgagaaggaagtgcggacacggtacgaccgtatgttcgagcgacgcaaccagggcgtgttggcggagcactactcgaagctcatcaacgacgatggcacgatggtggctaccgatgcccccaaggatgccgtagaaatcgacgacgaggccgacgaggatgccgacttcctctcggtcaagcgtcggttcgccgcaggcgatgcagaacttggcgggaagagcgattcttccgactcggaagattccgatgcggagccaaagatcaaagacaccaagggtgtcaagatggtgcacttggacggccaggacccactactcatcgactcgaagcgacgcgagaagctgctcaagtcgaagaagaagctcctcaagttcaaaggcaagggtacgaaattggtctacgacgacgacggcaatgcccacgaggtgtacgaaatggaagacgaggacatgttcaaggcccgcggcgacgccaacacccagcgcgagaagttcctcgaaggcgagacggagcgcacacgccaggccgatatcgaggacaaggaggttatgcgcgagaagcgacgcgagaagaaggagaagcgcaaggcgcgcgagcgtgccgaagccgaggccgaggccgcgatgtcggaggaggaagacggcctctcgcatctcccccatgtgcctttcgagatccccggttccgattcagactctggctccgagcgcgagccacggcccagcaagaagcagcgtgtctcttttgccgagccggacagcgacgacgacaagcccaagagcaagagccaggcttctgccaagcctatcgaaacgctgggagatctggaggctctggccagtggattgcttggttaatgtatatttcatggtttcatgtgtttgaggtctttgatggcgtatgttttccaaccaaaaaaatctctttcccggcgaggttcaaaagcatagtgaatatgaaagcgataatttccagatgtgtataaactatctcatacatgtctaaataagctctaaaagcctcctaaatgtagtatgtgtgcctgaactacctactccgtacctgtaaccctataaaatcttaccccaacaccaaatgtgggggcggacatttccttgacacatcaacgtcacatttcgtacgttaagccctgtgtactcatcgatggcttcaatcacgccatcgaggaagaaaagtcttgctatgtggtttttatcttcatcgtgttcatcttgatctcaactgttcccggtcaatgtgcctaatataacttagtgctaccataaacgccaaggggttgttgccaagtgtgggtcacgcgacttagggctgaatcgtcttagttcatacataccaacccggacaggtgagagatgatattgtttgacctttcttttcatgttttgtgctaagacaaagttagtggatacctccgtatccatattcattctatatcatggccgacatcgagaaatacccggcagcagagccctccaaggttccagacacaaaagccgatgatgtcccggcaaacccatttgtcaacgcagacaagctggctcgccgattgtctgggcgtcaggtgcagatgatcgcgattggcggtaccatcggcaccggtctattcctcggaacgggatcgtcactttctaagggcgggcctgcttcgactctcattgcatatgctatttgcggtggtattgtcttcatcactatgctgtgtctcggcgagatggcggcatttatgcctgttgctggatctttctgtacttatgctgggtgagtattagttacttgttttttcagccggatgattactaacttgctctatagtcgcttcgtggatgatgcgcttggattcgcattgacttggaattattggtttaatgatgctgtctctactgcatcggatatcattgctttacagcttttgttgcagtattggacggatcatttcccaggttgggcaattagtctaatcttcttggttgttgtcattttattgaacgtcctatctgtaaaggtttatggcgaggtatgtctagatgacttacactctattacccacctgatctaactgtccctatctaggttgaatactggttgagtttactcaaagtcatcactatcatcgtgagtgctatcccttacacaatacgcgcacgcccagctaattatctttctagatcttcattattctgggaattgctgtgaactgcggcggaaatacagaccacgaatatatcggcggcaagaactggcataaaggcgatgcacccttcgtcggtggaatcggtggctttgcatccgtatttgtcacagcctccttcgcatagtatgtgaactcattttatcattggttctgctcaatgagctccattctaacaatcgaacagcggcggcaccgaatccatcgccatcacagccggtgaaaccaaaagccccgcgaaaacaatgccaaaagtcgtccgcaacgtcttctggcgtatccttcttttctacctcctttcgatcctcatcgtcggcctaaatgtaccgtatgactacccaggcctctcagacggcgacacaaagaccagccctttcacaattgtcttccagcaagctggttccgctgtcgctggcagcttcatcaacgctgtcatcatgacttcggtcatctcagcggcgaaccatgccctcttcgccggatctcggcttctattcactctcgccgtcgatggatatgcgcccaaattcttcggtcatctcaatcgattccaagttccgtgggtggctgtcctcgcgacatctgttatcagcggtctctgcttcggggccagctatatcggcgctggaaagttgtggtcctggctgcagaatatcgtcggcgtatcaaaccagctctcgtggatttgtatcggtcttgcttctctgcggttccgctcggcgatccgggctcaggggcttgagcatctccttccctttaaaaattggacttatccgtatggtccgatctttgctgtcgggcttaatattgttctggttctggttcaggggtggaagtgcttcagtccgcatttcaagcaggtcgactttgtttcgtattatattgagattccgatcatgattgccatgttcctcgcttggaagctggtcaagcgaactagctttgttaggaagtctagtatggatttgatgacggaccgatatgatccttctcaggaggatgggtacggggatgggcctgagggtccggttacggagaagaagaagggtgcctggcgtaaagctcaacggtttgggcagtggttattcttttagtcttgcttttctttattctgtgaaaaatcgtatttcgtttcttccagttcttaggctttgtataacacctcttccactaagccgttcaagggtaagcttgtagtcgcttttgacacagcggtgtcgtaggctgtttcaatgcaatccacacacgacgcagctgctgctttgacttgagattctgtacagagtagttctgtactgcttgttggaacatagccgagaatcatgtaaatctaacctatactttattccatggtgctgcagttcatatcaccgatctatggatttttccaaagttggctcgcgccgtggccactctgaataggatgatatcgctcggcgtaggtgatatagtagacaagatcgtcggatatagtacggagcataacggagtataaactgaaccgttttaaccttacagccctaggctaacgagattttaagaggtttgaggctcgacgacccattctatatgatatgaattttaatggcggtttccgtaacgttgtagcttggttcctgtctctgtagaaagatggcaggattagctacacttggagaaagggggaaccctcaaaaatggaggacaagaaaaaaaagaaactccgatagggggaatcgaacccccggctgccgtgtgagagacggcgatgttagccactacaccatatcggatgaggactgcgaattactctcttaggtttagctttgaccttttgggtttagctttgaccttttgggtttagcgctctttgtccgtgtgcgttcccgtgcgtggttctataaagtcctccctttaaatttccggctctcctactcctcctttcttccccagtgggagcggaaaatatagttccaggaaatgaggagtgggccttgggtaacaagatgaagctgaagtaagtttacattgcttctatatctactattttgtacagagaacgtcctcggactctagttcactaatactcagggctatgttttgtacacagactcgctcgcggggttcagccggcattcgtgccggtgtatcagtcggaccgcaaaagtctccgtacggtcgggatccacacccgcgttttttcgcgaatacttatgttgtacaacagtctaggttgtatttactaaaattgaaaatgggagatatatatttgatggggggtgggtcgtacggaaacttttgcggtagaactgtatttagacttctctattgggccggggtgggcctaggcttccgcaagacccaaagcccaacccacgatgggccgggggtcgagccttcgggcccaactcggtcttcctgctgttaacagtgctcgcccagcctctagtcaccagcctctccaacatctccggtcgcatatacctactctacagttgcctcttgctgttcgcagctggcgcggctcttgtaggtgcagcgccgaacatatatctgctcattgccggccgggtcgttcaggggattggcggtggaggggtggatgtattgacggagattatcgtcgcgaggtaaatgggaacgaattgattgggttgtgatggtcctttttgtcgttgggtctaccgccacaatcgccccccttagctgggggggtgttctttatccatggagggcgtggcagacatacgtgccattaacaataggtccgctgctactaggagtccttgcattccatgaataccgcacggaaattcccatgtttcctcatcggatcctcgcaggcacaaccccggcgtgctgcatgatcgggtctctaatccatgggctgataacagccgctgttatctacattctccctctttattttcagggagttcaacaggaatcaccgataaaatccgcaataagtgcctttccattcagctttctggctgttcctagtggttcaatcgcggcgttcctggttactgcctgttcccagtacaactggatcatgtggacagggtggattaccatcagcctgggcgttggcagtatgtcactgttgggcttgcaatcctccagaagccttcaattcggcctccaggtcccgggaggaataggtgtgggcgtattgtacacaataatcgccattcccttgcaggcgacgatgcacgttgatgatgtcggtcttgcagtgggcactctggtcttcttcaggctgactggtcagattattggtctggcaatcagtgccgccatcttttctaatacctatactactcgtgcttcgcgctgggagaacctgccggcgatagcggagcagttcagagacggtagtgcggcagtctacgccatcggaaaattatcgtctcttgacggatatccgttagtcaaagataaaatacttgaaacttacgccgtcagcttacattacgtctggatagcattggcggtcttggcacctgttgggctgttgaccagtctcttcatcgggtgtaaaccattgaaaaatgatgagataggaaggcagggatttgccgatataaggcttcaggagcaaaacatctagcattgtataatagacaaatcattattctatctcaattggttggatgactatctatcccgcagcgttaagaccgcagttgacaggaagaatagacaccttcaacgtgtgatcactggcaaccaggatggatacaatcactcgctcaatataggtaaggtttctgagttggtccgcatactaccgccggccacagacttcccgtggtccccgtcggactcggaagccgtcgctctcggtcacacccacgtatacttatgccctccatttgccatagcccggagagccaattcatattcatatcaccgaccgtcaggaacgaccggacttatacttcgggtttaatgaggctcagctcacaaccgccatccctgtctccagctactggctgtctgcgacattctacgaaccgctccgactacttcgatcttttccccgagtatcgcctgcaaccgacggaagaataacgccgccgcaatgtcccctcgaaatctcatgtcatcaagacggtcctgaccctacatgtagtaccgcagtcgatccccacgttgcagcgagcttcaccacccgaggcaagtcgcttcgttagactaaggccgagcgaattatactctgtcggggcttacaagtgacgactcagttgaaataatacgccaagcattatcactagacccagttgtatttaacgacagccatcaagcatgggcaaatagtaagggaacgacccttcttgaaacactcaagactctatcacaggcagtcaaagatctccagaaaagggccgatacccaggagcaaggacacacaaaaacacctagaggatatacaaaagaacctcgaggatacacaaatagacctcgaagaggcacagaaagccctcatcaaatatgagcggacgtttgacgcatatacaattgaggtgcagtcaattgtgctggataaatgggctgggaagtctatcagtaatactaggaggtctcagcggaacgctgctgcccacggtggtagtatccttgccgattacgacgtgatcctccgggaggtggactagccaaactcgagggtagacctgtggaagccggcgtttgaatcccactatatccaaaatgcttacaatttgcttaaggccttccagtagactttaccggatagctactggcaaaagcgatgcgattgcagcctgcttttcgaggtcaagaagttaaagaaggctgatatacaggtagattggtaggctcttaggttagatctgatcagccttcttatcgaagacgaattaactagtggcctaagaaaccgcgagcgcgtcctttgatatataaaccatattgagaggagatttatcgaattagtataaagtatttactcgtctaaaaagtacccgccaagaacggccttactcagagtagttaaaaagggtatatagctagtaatttggcgtgtgtgtatagtaagtctcttttaaagaaaaatctattcttgtcttggatatatatatgccagaaacaaccggacactgttatcatttctatcaccacctggggagaagttgacgtatccacagcaaaagacgtttttatcgggaatggaactgtactgctttctgtcatttgtctgcgcttgttctgtagacaggctgcgacggaatactcatgcaatgactcgcgtacattaaactcacagaatcgagaacacgttgcaagtctgccctgctcttgcacgcataaaacagcatcacttcccttgcgccatgaattatgaggctcataaaacttcccctcgtatttttgtaggacatccgttcgcatgtactatatgatcggaatctgcgcaaagttgtccacacatctatagaacagctatttgtggtactttcctggcacacctggaggaaaaggcaactgtaaatgtctcagtctctcttattattcccattaccagaccagcaaaattttgcctcctcaaattggcagttctctcactatcacaacttaacaccgtcttattatccaaagcccttcaaatgaaagccaatgtgttgtcccttcatgaaatgacagcgatggccttgagaattttctaacgcgctgcccttaacaacatcgccagtggtgttatgggtcaagacccgtatgctctccatagatacgaatttcgattttttggcgaaggcagtaagatgcccactgattgactgagcaaagatggttgtacttctccggtgttggagagaaaagaagatacaagaactcccaatcggagacatttaagcgacgagtcctcacatacaatcaattttagctcgtgattggttgcgtcgcggttcatacgcacagtccaatcagaaatggaattatcagaaagaccagacccacttacgcgactgattgatgtatagaaccacgtgagtggacggcaacttcacttgagaattttttttttcattcaatctcttcacaggtctaaagaagtgaaagaatgcgccgatataacataccgatgagtcacagctcaaatgagggcagggttgagcttgaggctgctcttgagaaccctgcggatggcgacgtcaacttggcctttccagaaggtggccgagacgcataggtctgcttgctaggatcatgtctcatgatattcccctcatttggctttcagactgcaggtgaggatggaccatactctttttgacctgtcgaggacacgatgacttacactattgatagttggatccgtccaggattatatcagcacccaccagttggctgaatatggagagagagatgtcggctggatcactgcagtgcttgtattcctgaccttgtttctcggagttcaagctgggccgctctttgatcgatatgggcccagagtcttgttgatcagtggatcacttgggagtttcgcttcctacatactgctcgcagaatgcaagaagtattggcactttatgctctgccttggtcttcttggtggcatatctgcagcaattgttacgacagtctccattgcagttctcagtcactggtttagccgaagacgcgccctcgcttccggaatttgtatgggaggatcatctgcgggtggtgcgatcatccccttgatgttacgaactttgtttggaaaatatgggtgcatatgggtcatacggaatgtagcctttatggctttgggatgctacatggtgggagtgctactcgttagaggacgcctaccccctggcagcaagaacagagtgacgatcgaccttgcagctttcaagtcaccccgtctatgttttcttgctgtggcagtcttttgtttcgagttcatcatttttggatgtgctgcgcttcttccatcctatgtccgttacagccggttctccgtggatgtgcaattttattccctcactgtcttgaatagcatgagccttctcgggagagtcctccctggctttgctgctgatttatttgggcgatttaacattttattatccttggttgtgataaccatcgtgataatggcgggtgtttggctaccatatgtaaacttcctgctagccctagcgttcgagtctataccttggctttccatttccagttccagtccaaaagagcccatcgggacaagatgacgctgagaagtccaacgagcataatggcaaagtagaacccaatgagaacctgtgaaatgaagttaggactcggtgtgagggacggctcataggtgaaaaatacgtttcacgctgtggttgggaacagagtaactcggctagtcatgcgtagggcgcgcgggttggcccacccatcattaattggttgaggttgcctcacttggatacgcttatcccgccagcgctttctattggtcaaaccttgataccaatccagccaatcagaaaagggggaatttcgtatctcactattgaatcccggacagagaaaggtacagatgcaggaaatatgaaatctatacattcgcatatgcagacgttcttaactagagagttgaccggcttcttacattcttctgcatcatatgtgagtaaagcttcatgctgacgataaaattacctgtaacatcctgacccgggcccgcctccattggatgacaggctgatcacattattaacgtctggtcctcctgggcttcaccaacaaaccgatggcattccctatgtgccctccactaaatgtaattcacataatcgaaatcttatgatgcctggccagatggctcttatatccaggaagagacatccaaacactcaaatatccagcaatatcacattggcgacccgggctttcgaaaatgtcctgaaggtaatgacctttaaactaaacctgaagtatagcttctgttgtctgccatgaagatagctccccactgtggagtatgtcgtagaagcttatgttttgaaggagctaggctgggcgctattctggcgttacctcgtgaccttactaagggacggcggcttcaaaagtggggttctctttattactttgctctttggcccgtcgaccttgccagtaggggtacgttttggtcacgacttacggctagaaaagaagattccagatatctattaaagatataagtccctgacgtagatatatattcgcaagaagacattagagctcaagcaaaaataagtttgttttcaaaactcgcgaatcatgcggtggactgccatctcctttctccattggaggagattctggatccgtccggggtcaaagcgcggggtagtgcccgtccggggtaaaactcgccgaacccatagcccgcggatgagatgacaccgagaggtgtcctactctgacattcgtcgagttctttgaagatcgatcatatttatcttgcattctacgtccaatgctccctagtgagcatgatgccctacagacatagagagatcaagcatcatgagcatccaacttcatgttcggaggccagcggtcgaagacactctgaatgggtcacgtttgctgatcatttgcccattctcaggttaaataactagcgcttacgattaacctctcccggctcctcggttaaattccaaggtttattcgttcattatgataggctcgacatgaccgggctaccctgacagggaatcaggagggtcggactttagagtggacaacaagaaaaaaacctgggacgggacacagacatgactcgcattcactgagcgagggaggattctggattctcccctaagatccaaagaaggatattctccggcgaatggaacgccacatctagacgtataccaccacatttcagcataccccgcaaagtaaccaggatatttcctccccgctattacctatcaggactagtccatgtccgatcacttcgcttgacaagaacccggcataatcaagtgacgctgctaccgtagtgcccggggaaatgaccctcatgcaaggagttgccgggttgaggtggtcaatgtccggagcaagcttcacccaattgagctaagatcgggaccatcatcacgagcgtgtcgccgcaggtataaagatctgagaccccctgtcatgcctgcccctctttcattcacccgtttctctcggaaatcgtcaacatgaatagcgacatcacagagaagcagacctcagcggaggagatcgagggacagcccacatccatgggtggacttgtctacgatgtcggtgagaaggcccactacgacagagcgggcgccatcgaggccgaggtgcttgaacatagtatgactgtgcttcaggctgtcaaggcctatcccgctgccagctggtgggcattcgtgatgtcatgcaccattgtaagttcctgctcgagataggcagatcatttccgtaacgttgaaatagatcatggaatcatactgtgtcttcttgatgggacagtttatagcgacagctcaattcgccgaggattttggtgtatacagcgaaaaaacaaacgagtggattatcgaagcttcatggcagtcagcattccagtgtagcgggccaatcggtgccttcatcggtgtgttcatggcaggtcccattaccagttggattggatatcgatgggccaccattggtggtctcatgttcttgaacggcttcatcttcatcttcttcttcgccaacagccagggtatgtttttcgcgtcccagatcctggaaggcatcccgtggggcatttttatcgccaatgcacccgcctactgtgccgaaattgtgccaatgagattgagagctccagcgacacagatgttgcaaatgttctgggcggttgggtcgatcatagtcggcggtatcacttaccactaccaatccaagaatgactcgtcagcgtacaggttcgtccgctcccatagatgccatagaggagcactgtactaacactgatcccagagttcccattgcaatccagtggatttttcctactcccctcgctatcctactcttcctcgcacctgaatcaccctggtggctcgtacgaaagggccgtctggctgaggcagagaaggccatcaaacgccttggacgcgcgagtgcaaatgataatcccgctgacgcagtcgcaatgatgcgtcgcacgattgaactcgagaagactgagaagaagcccagtcttattgaactgtggaaaggtaccgatcgctaccgcacattgatagtgtgcggtgtatacgcatctcagaatctgacaggcaatctgattgccaaccaagcggtttactttttcaaacgtgagtccagccatttcctgcagcttcatggcatactaacaccagctcagaggccggcatggtagacaacaccgcatttgcacttggtctcatcacttctgccctccagtggatcatggtcatgctctcttggatcctcactacatacctcggccgacgcaccatctatgtttatggtcaattcatcaactgcgcattcttagtcgcgctcggtattgcggcttcagttggcactagtaacgcggctagcaatgcgcaagcgtcgcttggcttgatcgtctctgtcctgttctgtttgggacccgcgcctgcctcatgggttatcatcggggagacatcttccgttcgtcttagaccactgacaaccggtgttggacgaggtgcatactacttggtcaatattccttgcatcttccttgccagctacatgctcaacactgataagtggaatctgggcggcaagagcggctacatctgggctggtaccgcctttttctgcactgtcatgtcttggatttgggttccagagatgaagcacagatccttccgtgagattgacattctgttccggcgccatgttccggctcgcaaatggaagcagacggtcatcgatatccgcgatgatgagtagatggaaattgcggtttggaggttgctttagggttagcgatcaatggaatattcgacttaaaggatgattgatcgtcttcgaggccatcgagtcttaattatatacctgggggactagtgctcccaccctgttacgattcacgtcataccaccccctttcctatttgggaatggttaatgcctgatacaccgccttagtgtttccctagtaagacggtagatacctacaatttgtatgtaaacactaacaaaattaagtcacttttaccacatcaactacgtcgtcaactacttcaaaaactacttcaaaaactacttcaaaaactacttcaaaaattgctttatcatcatcaagggattaaggcatgtagttatgagacaaaatacacgttttttcctgatcaaaatgtaggtttttttgactcagtctcgcagaattaaattgatgccttatgcgtaaggcggaatcaggcggaatcgaggcggaatcaaggcggaatcaagcggaatcaggcggaataatgcagaggggggtccctataagttataacaatccccttcgtatattatcggaccttgcaacccttcatgtatgctattgatcaaatctatacgcctcatcaggtgtgactcactatccgcgatagatcgctatcatgcttcatgtttgctggcttgcttgctatttgcattacttcatccgattgttattgtttgccacaggctaagcgagatgttcagaggttttcaatatttgcaaagagacagctatatcaacaagctgcttcccacgtttgcaacttgcttcttctttctctccatcttggttattctgaattcttctctcttgcaagtatgttacatctaatcctctcatgtgatcaactgactgaggtaccggcgtggcgttggcacggtatctgtcgaggactcgagggcatagcgcctagtactatgttccgaagtgccgtctcctcgtcgaggtcgggttcaagattgggtagagccacggacctggaagtcgagtacgagactgtacccaatcttgaacccgaccttgccgaggagataatactagtcgctattcccccgcctgagcattctccagccccgacagataccgtgccaacgccacgccggcaccttgccctacctactatccgggccactcccatttcaggagtaggcacgacatttgatgcgccatgagtcgggccgtttcgctcgacaccctcgcttatatctctgccgcagaacttcatgccgccatttccagctttgaaatcaaagatgtcgagaaggcgttgaaacttcgtctagaccaaagagacaaagaaacaaagagcttgagcaggttactcctatttctcccacagctcctaggtatggtgttctgaagatcaaggtattatagaactaacatgttgcagtggagtatctgaagctgattgatgaagcattgaattgatcgccctccacggaagccagtgtagggtggaccatcgatgccttgctactcaatgcccattcaatcgtagcagagcgcacatcctccgcacgctctatcaacgtccagccagtgcgctcgtatacatatgggccggtgcgatcgaagggaagaccgtgcgacaatccagcctatgtacgacggcaaatgacgaccacaatccacgaacgtacgggttgactgtacatgcggacagatttggttatgacttacgccgagaacggtattcacttcacacccgttgccagaatatttctgggttccacccgaggagtggtgataaatctaaacaaatcatggaccgcccagacaagatcgcagaagatatttgggagttaaaagagaccgcgccgtacatgagaatgacatcggttggcctacacgactgactccttctatcaaacgactcacctagagccggcaccaagccctgatctgttcgattgattgcgcttgcgtctacggctcctggttgctcaaatagcttgctaatataacttggttccgaattttcttgaaactatgagccgctatctcgtttaagtaaaaaagtggcagatcatggttgggtcatttgaaagaaccagcctaagagtctgataaaatccgagagcggctatagtaactcccatcaccggcgttgcagctgaggtagctcctttcaacttgaagttgcgagttgtattaagggcaaggaaaatagaatagttgactaagtctacagcatgaattatggagacattgtttctcgctttctttcggatgtttgaccctagttataacccgcaattttagtaatagaatgcaagcgccggtgacatgtccagagtaggtcagggacaatctgagcatggccacatcgtttagtatactttcgttccgccgacggaattcgatatacgtcattcccgcgtacgccgtatcggctttgcaatgacgtgagacatgaggctaatcgctttgtcctcgtccccatggttctagagagtcttgattttccgacgtttctcacctccgtcctctggtgaggcatttttattattcactcaggcacccgagccccgccacttccgtcacctgggcatgcttggcatgcttggcgcgctagtcagcgccctcaggcaaacgacgctagtttcactcggtttacggagaactccggaccccgtttctctttgctcttatgtacctacgagtactacaaaaaccaggcattttgactctttctccgttgtactgacttgcccctgctcaaattctaattggtcgcgtgactatcacatgtctaccctatagacaagcgcgctacgcagcaggtcctcaacatgtagcttctcagctgctgcctcgtctgacccttgaccagaagttacttgttcatgatgccaacacccgcaaggtcccacggcgggcgagtcgtgaccagcgcggctttcattatccgaaaattggaacttattataaatgtaccactgctgaacgcccttggggttgcagtcaaaggcttcgatatgttacagtttttttattcagtacaccgagccaccgtctggtctacattttttattttgtagtccatatcgaatgcaaaagaaacaaagccgagcttgtaacggaccacacaatttggaaagtaaggcgagtactgatatttacgctaacatatgttgtggctgtacggcgtaagcttggcttgcttctaataccgcattgcttgtcaaaggttaaccattttctatcaataactgtaatctgatgacaactaaatcagtccgtgttaccggaaagccctcagaccctcagatggtagtattcagctgtccacggaaattgcatccaaccatgccatgccactatcagaactagtacgcgagatgaaaaggggccggattggtgatcttgcagtccttggcgtggggagaatactgaagccgagacttaagatttttaagcaaaactaaagagttcttacactagttataaaacacggatatatcagccggttggtaacggattggctaggggataacccccagaaacccagaatccttgactaactattccccggaaatcatctgttcaacacagatccataaacccgatcacaacaagccacccacgcaacaccttacggagatgccgagtcggtcccgatgccacttacgacccttctacagcctaatcggaaagccgggtttgacaaaagcatttagccgagattgcagcggtccgtgtgccatgtgccgcggcgcaacggatctggatataattggtcgggaccctgatacataactgggcgagccttgtctagcatacattaaagcacttggcgaaagaagaatttacgtcatgatggggcgaaaagcttgcgacgtcatgttgggtggaacggccttggcgggatcaggtacacggcaatagtaggatgcaaacatgcatagcatggagaacgtgcgaggcagaaccatttgaaattacctgggtgcatttcgccatggtagaaagcgatgaaaaaggcatagcgctattgatgttactgcattagacacaggaatgggccccgcggcatgccgttttcaaaattagtcatccgtgcccagactcgtggacccccgccaagtgcgccaagtgcccccaccaagtgtccccgccaagtgccaagcggaaagattcccccgcgtctctccgcatcgggaacgcgccctcgctggactttcccgtttcggatcggccaaggacgtagtataagtccgattttcaatttaccatatccgttgcagcccccgtggagaagtttgctataagactcccgattccgccgtctcaatatcttttctttccttaccactttttccccaacttttttttatctccgcgcaaacggacggcccttgatttgtctgtaccgccaatatgtggacaaccaccagtggcctgagtggtcgatcgctccgggtgagcatcaccttcgtcgctgtcgtgggtttctcgctcttcggatacaaccagggcatgatggccggtctcctcaacggcgacgagtttgtcaagtcgttcccaatcctcgaaaaacccgacaatgcaactccttccgaaagcttctacgtcgaagtcatccgcggtgctgtcacatcctgctatgagattggatgcttcttcggcgcgttgttctccatgttcttcggtgagagcttcggccgtacccgtgtgatctgtatgggcggcagtgtcctcatcatcggtgcattgataacaacagtctgctttactggtcattgggaggtcggtcagttcgtcatcggccgtgttgtgtcaggtattggaaatggcatgaacacggccacgatcccggtctggcagtcagaatgctccggcgcacacaaccgcggtttccttgtctgcttcgagggtgcaatgattgctggtggtacctttatcgcttactgggtggtcttcggtctttcgcacgccggagacagcgtccagtggcgattccccgtcgcactccagatcttctttgctctggtcgtggttatcggcgccgctatgctcccggattctccgtcgtggtttgtgaacagagggcttgacaacgaggcctgtgtggttcttggcaagcttaagggctcctctccagattccgatttggtgctccacgatttcaatttcctcaaggcggacgtagaatcatcgaaagccgctcaatccggctggaagacagtctttaccttcggcaagacccaggaactccaacgtcttcttattggctgttccggtcaattcttccagcagttcaccggctgcaacgctgctatctactattcaacgctacttttccaagagaatttgggtatggaaaaatatctgtctctaatcatgggcggtgtttttgcttccgtttatgcccttgcgaccatcccctccttctttatgattgaaagagtcggccgtcgtaacctatacttgattggtttcctaggtcagggactcagtttcgttatcacgtttgcttgcttgatcgagcaaaacgagtcgaacgccaagggtgctgccgttggtatcttccttttcatcactttcttcgcatttactatccttcccctgccttggatctaccctccggaaatcaaccccctccgtacccgtactatcggcgcgtcggcctcaacctgcaccaactggatttgcaactttgccgtcgtcatgttcacgccccttttcgctgctcagagcccttggggtgtctatctgttcttcgcactgttcaacttcatcggtctgatcttcggcttcttcttctacgttgaaactgccggtcgtgagcttgaggaggtcgatattatctacgccagagcccatgtagaaggaaagatgccgtggcgggtcgccaatgccatgcccaaactcaacttcgaagagatcgctcaacaatctcgtgagctgggcttgagttccatcgatcatactagagatgagaagagcgagcttggtctcagcagcagtgacaatagacaggaggttgaggaagtcccggagaagcactaattattttgggtgaatgcaatgacgtgccaatgtgtggttgatggtgataatgtttgtgacatggttttttagttcaatttccttttggtctatctcttacgttcggtcggtccccttgacgtcttttgctgtggatatatcaacttctgcccaggtgatgatagaactgattgcagtgcccaggtgtttctggcatgtatatatatccaagacaagaatagattcttttcataattctatctattattctacttcttctacacaccaaggctgatcttcatttccacctgaataggtgagaacccgggcagtacagcaaatcgagttattttattacagtaattcgataaatctcctcttaatatggtccatatatgaaaggacgcgctctcaggccaggcaactagtgaattcgtcttcgacaagaaggctgaccagatctagcccaagaccctgccaattcacctctgttttggtcttcttgaacttcttgacctcgaaaagcaggctgcaatcgcatcgcttttgtcagtacctatccggtaaagtctattggaaggcctcgagcaaattgcgagcattttagatctcgatcgcggtatattcagccggacatactgtgtcaattatcagcatcgcgagatctagtggaaagttacggaatccggtgtgtacgtgtactttcctccttatctgatttcgctggatggcctctgcaagcttcagcacagacagtggattctggcagatttcgcgcagattacgaagcgctctttttatctcagaatcagattggccgggggaatctgaatctgatggcatttcagaccatcgggtgcgaaagtcttgcgtgtctcgcaatctatctttttgccaaaagtgttgcgccgcctgtacaaagatgtcgaggtttgcctcgatgcgcgtaatgcctccttcgatcaactggccgaatagcgctcaacaatgggcatggaccagatacccaggccgttcttctggtagctaataagggtccggtccttctggactgactcgtgctgcgccaagctctcccagtagattcgcagtatactttggcatgaagatatcatccaattgactccatattcgtgcttggtttgggctgcgcggaaaattgtgaactccccaacctccatcgaagacggtgatgcctgtgaggcgatgccgttgatccgcttctactagaactaggctgattcagtcaaatgatcatgccaagtttctctgggatatactcacttccgcggtagagagctttccatatcgggggatgcttatggaaaactgtcttttcgacctcagcggacgggacgagtatatgtttcttcgcacgatcgtcatatgtcttccaccactcttgctcatcctttatttcgcgacgtgacggtccttccccattaatccagacctcgttgatagaagaagcacagggtagacatgatggtaggtgggaccaccattttctgccgaagttccaagtataacttgggtccttgcgctggcccatcccgtcaaaaatcattgctgctgagttttcaaaatgtcagtatagtatttattgcgagctgctcttttgaatagcaagaaaattcacactagaaataacacaagtggtataatagtgggcgctggatataagactggtcgcgtgggggctgctgacccacggcaccggtctacaggttctgaactttgataagcaccaccggcatgtgtgcattcaccacatcctccgtcttccaaatatacaaataatagtataacccatgccaatcatagctaaagtagaatctaagagaaactgaggagatggtttccagtcacgagacgagagtttatggcggaggatatctcgcttcagcatattagcggagtattttgacctccagcatttagagataacattctggtaaagaacatcctgaagactcggaaattcttgggccggcatatcttttctcaatttcatcgtccctaacgaatgaagcaccctagcgctggtctcaacattcgctgtcacctgcataatcgttttaacagccgccaaaactgtcgcgacaaatgtaaaccctcgcattacggtcgctgaactctccattattctctggtttaccttatgaatgtcttcccttcctccatctatgcacccccagtactaacaaacaaccaggaggctctatccacctcatcctcgaaggctactatgccctaaacttcgccacccttccgggctcccagcaactcctcgcgcaactatggaaagaatactccatgtctgattcgcggtatctcacttcgcacgccttcgtcatgtccatggagtccattaccgcctggttctggggcccgttatcattcgtctttgcgtctttcattgtcacggataatccattccggcacccgctgcagattaacatctccaatggacagctgtacggggatgtactgtactactggacctgtgcgtttgactttctggtctacggggttgagtactctaggcccgagggatattacttctatgagtattttgtgctgttgaacgggttttggattgttattccgatttgtaagtaggtttttttcattctgtcgtttcttcagagttggtcagtgaactgttctaatgtttttagtgctcattgcccatagtgtgagagcttgtgggagggcttttgcggaggccaagagggtgagcacggtcggaatgaatgggaatgcgaagataacgtcttgaagaagtttgttcaacgccatatcggaactggttttatatacctaggcagtcccgatgctatttaaacgatgacaaaattacagttggtgagtgctgtggcattgggtctcaattcgccttttcggcaacggtcgtttagcaccgtcctacgatccctacgtaacagcctagggatagctaaagcaggaatgtttataacacgacaacatacaattagaagcaatgatctgaaagctatatttcaaagaacgtatcggaagtttgggttctgttaactggttagtgaaaagatcgcagaaaggaacaatgatatgcagtcactaacctcgaaatcagttagatctgccccagcactctggtcgacagatgactcgatatggcccacagcagaagcggcagcatctcgcagcttgtttctgcgagccagcacaaaccgcagcaaaacggccaaagcagcttgtgcagacgagcatgccaggatgagcttgactccggtctggtatacgggcgcctcctttgccagaaacgcgtggggtccaatgatattgccagcgcagtacgcaaagaaaacgaaggcaatactggttgtacgttttgtataaccacccaggtttgtcgccggcatctgcaaagccagtaccaaagagcagacgtaggcaccgatgatataataaccacacaacacgccgaccttgtatgtctgatggtccagcttccataggagactggcgccgatgacagtcggcatcaagtaaatgaacatgatgacagttcggaagtttttgattcgagatgcgagatatgttcctcctaggacgtaaaagatctggaatcctccaaagggaatacccagcgcgatagcagtggccgagtcattggtcaaccccctgataattagtttgccgaagctcgcgatcccaccatttacgacctcgttcagaagagtgaagaagaacaagatccaaacttgtggatcaatgaaagcttcacggatctgatgccatttgatctggtgattgatgataccggtctggccgagtcgaccgcggccaatgaggagggccttttcgtccaggctgaaacgcttcgatgagataacgtcatccgggaggaagaggagcatcacgactccccagacgagggtaatgccgcccagaatgaggtaaatcgctctccatacagcaatggtgtcgatttgtccaattccatatgtgagaattccacctaccatagctcccagtccgttgcagctgtagaagacaccggcacggaacggttgctgagcacgtgtgtaccacattccgatcatcatcataaagcatggggtgatgggggcttcgaagactcccagaagaaagcggcagatagccattccagtgaaggaggagcaggcggcagtaatcatgagcatggctccccaggcaataatgttcccagagacgactttggcaagctttgtcttctgtgccaggatattccatgggtattcggcgacgagatatgcaaaataaaagatactggcgagccagctgtattggttgcttgacatatgtgtcgaagagagaaggtcgaatacggcagagtaggcgagtgctgatttgtcgatatattgaagcatatacgttccagaaagtaaaggtaacaaaacaagatctactttgcggaccaatgccttgttgcgtggctcgtcatccaggagtgcctggatggcctcttggttgaagccatgttggcggaggaagacctctccttcatcgagatccgttatagtgccaatttgcacatccttctcgtcgatcgtatcgtccacgggtgatttcttgtcgatctccatgctcgccattcaatgagtaatgagtaatagtaaacaaaaagatatcagggagccatatatatccctcgaatccttcggtcataattttccgttatctttggggttttcccccgcacggtataacctagctactttcgaccggggagatagcgatccccacgatgctatacgtatttaccttcggctccaccaagatagcccccacacggtatgacttcggcgctacttttgaatcccggagagatagcgaccacgcccgcggtgctatatcttgctcccgaccccagctcttatctctcgggatttctcttcgttgatttaccactgaaccgtgatacaatcatgactgctgatgccaagtccccctccgtcaccttggcgcaaggccacgtaataggaacccaactcaaagacactttcccccaacccgtcgacgccttcttgggagtcccgtatgccctccctcctgtaggcgatcgacgcttcagaccagcaatcaaagttccgagctcatcagataccattgatgcgtccaagtatggccccgcggctcctggaaaggcacttctctccggaggaccgaagctcgtacagagtgaagactgcttgacggcgaacatctttcgaccggctggcagcaatgatgggcgcaagctccctgtcgcggtctatatccacggcggtgctttcaatcgaggagcggcaactatgcacaatactgcgtccatggtggcgtggtcggaacaccccttcgttgccgtgagctttggttatcgcattggagctcttggattcctgccttcgagtttgtcgcagaaggagggattgctgaatctcggattgcgtgatcagctgcttttattgcaatgggtccaagagaacatcgccaattttggcggtgatcctgccaacgtcactttgtttggtctttctgcgggcgcgcattcagtgaatctcccaattgctgatttctgtaatatttattctgaccaaaatctagattggccaccacctccttaattacgacgagcacaaatcaccattgttccatcgtgtcattatcgagtctggagcaccaacttcccgtgctgttcgcccatataacgccaaggtccacgaggaccagtttacagacttcctccaagaagtcggttgcccacccggtctagccgatgctgaaatctttccattcctacgttcactccccagcctgactgtaacaaatgctcaaacggctgttttcgacaagtacaacccttccctgcggtgggcattccagcccgtgattgacggggacattatccctcgcaagcccctcgaggcatgggagtcaaaagtctggaataaagtacccataatgaccggattcaacagcaacgagggaacaatgtacgtcgacaagaaaatgtcggacgcctcccagttccgcgagttctggcacagtcttctgcccgagctctcgccgtctgatctcgacacaatcgagaagctctatcctgaccccgccgttgatcccacatcaccctatattgaagacagacagggcgagggtctcggacctcaatataaacggattgaagccgcctacggacactatgcgtatgtggcaccggtccgccagacagcacaatttgcgtcatcggaaggtgttcccgtttacctttatcactgggcgctacctaggacggtcgtcggtcgagcaaaccatgccgataatatgtactatgagacctttaacagtgctatcacgggaatttcagaatcccagaaagagctgtctggcacacttcatgcctacttgactagtttcattacaaccggtgatcctaacgccgtgtctggtcgatatggacaaagaccggagtggaagcccttccagccggcggatacacaagttttgatctttggagaggggaatgaggagttgatcggaggtaatgttgctcctcctgcgaaatgtgtcgcagatgattgggcaagagaacagacagaattttggtggtcgaaggttccgatttcccagcttggttgatggatagaacgaacagaatgaattcatgctttctcgtgcgtctttttacatacctgtaaatgtctgtttagaatgaccagccgcgaactatgacgtcgttcatatattttcttctgaactagaaagtctatgaaaactcatgtgcaatattactatacaaaatgcttgtacttcaattcttgggatatttacagcctaattccaaataaaaaaaaggcactaaatggcttatgctggcacgcgtgggccaacacttctccagaactcacagcgctcaccacggccaccttcccacttcgacgcatctgccaggctgaactcattcgtgacgccaggtccttcccgaatccagtaagagaggttatcagtaactttctcgtagaccgttgttccacccgtggtgttcaaattcatcaacacgggagagttgctattccaccttggccaggagatatctccgttcgcactctcaggtacggtagaattgtctgcaccaccctttgcatcgacgatggatattatcggggtgtcattgatgatgaaattgccccaaatcttctggaatgcatggatcaaaccgggagtgggcgtagtcgccccaacagagaagtatgcggacagatctgccccatggtacccaggggtcacagagtattgatatttccagctctccgtggtattttttccagcaaaagcatccgcaagccagtatgaggggcagtcgaaggctgattcggcgtatatgtcgaagactgtctgctgaagaccggttgccatttccgattggttcagagcattctggccatggtcgcctagtgtatcgtatcggggagcagtgtcttggggagagctgtttcggaaaccgtagatatccagcaggcgggaatagtcactgcgggagaacaaagggaaagtagacttgacatagctcaggaagctagcagtggtgttcacaaatggcgggctaagcgggacaccttcattggcattgttctggaggacttagcataaacaaacctacgtgttggtatgatcaatggacttaccccagatagaacgcgcttgccgctcactttcttcgtgtataattgcttggatggaagctcctggatgaaatcgccatctaccacaggcaggaaggcccaggtaccccatgctcctgaaatggagacatttgcactggcgtattgcaaagtatcggtgtcagcattgacaaggcagtcgaatacggctgcctcggatacattgccaccattgtaacaccctgctcgtgcggcaaaatcctgatagtgacctgtcggcactttaccatcgtactggtgcaagtcagtggtataagggctggcggcaataacctatgcaagttagccagactgtctcagatttcatagcgctgtaactttacattattgaataagtggtcctcgcgaccaccataagcaattgattgtagcagcaccgagcctgctccagaagactcgccagcgatcgtgacgcgggaggcattaccgccgaacttttcgatattctcctggacccattcgagggcgaaacgcatatcaagcaggcctgcattggccttgccatacttgtgcactccttccgaggacaaaaagccaaaggcacccagtctgtactgaatcatgactgcaataaacccgttctcgtttgtggcgatccattcactggggtcgtattcggccccgaaaagcccatatccaccaccatctatgaaggcttagaatatgttctttcggtcaaatcttttttattttgacttgtgcgtagacttacgaatccaaaggagaacagggagatctttggctccgggcggagcatacaaattcaagaacaaacagtcctcattgcccagggctgaaccgaagccatacaattctggaagctgtgcagcaccggactgtgggcagagtggaggctgttcagtggcagattgaatggaagtcttgttcactgcaggggactgaggcggttgccatcgcagctttccaacaggaggggctgcatatcgaatccttcagacaataagtaaatataaaaaaacacgctcgttaagcctaatacggtatgttcttaccccttgaagacattgaggtcgtaggtgttgtcatagtaaccctggtaggtggcgtagtctaaatcaaccactgggctcgaggtttgaaccggagtagccaaaccagccggggcagtggtgagagccaaaaaaacaaggctgcttattccggcagcgaaacccatatctgaatctccaccgttggaatcggatgattggagaggaaaagagacgggacgggtggtatttttatgagacgatagtgattggtgaatacgagcttcttatgtacacctgcaggactgacagccctaagcgacctcgggagtccacgggccatgtaacattcctgagagcgagcggatcagcccgaatgtcccgttgtttattgactccactatttaaaggggtatataatatactatgcgtgtcctgaatggttgtgttgttagtgtcgagcttagcatatcatccaggccgctactaagcgattgcaaacactctgattgctccatccgtatccacaagcaatatacaatgttcaaatgtgcagaacacgggagcagcaatggggcaatgggggccaaaataaggagtaacccctaagtaatagacgtaaactaatatatcgctcaacggtcggagtttttttagaatccttcactctccccgtaatggcggaggaagtcgatttgagcgcgtcgcgggtcaccaccgtgactatatgctattcggttcccattccattcatgattttgtttactgggctccggcttttcgtggtactgcgaccttcatccaaagatccgttgagctttgatgattatatgattactttttccacggtctgaaccaacttttccttccggatcttgctgttcttgggatatccaattttctaatactgctgtaggcaatatccattggactctgtataagtggcttggtgtatggtaggttcttatgccaagatatatattggattcttgcaagggtaaggctgacccagattgaactttattatgtataggtccaccctacggctttgggagacatcaagcgacgctcagtacccatgaagtccaaggtttcttgcgggtgatttcaacagattcattatatcaatttacatactgaacattccgaatagggcgactatatcttcagccatttctacgattgggccattgcaagcattaagctttcaattcttgggctttactatcgcatttttagcacggtcgtttttcggcgagttatcattggcaccgcagtctttattttttgctggctcgcagcgatggagatcggcctagggctacagtgtatccccattgagagaagttgggattcggatgttaaggggacctgtataaatctggtggccttctcctacttcaccaacatcacgaacctggtcagcgacatatgggtctttcttcttcccctaccgattatcttcggactgcacgttaatcgaaagcgaaaattggagatcgctggtgtttttgccattggtctattgtaagttatgctctacgtcgactggaattcttctgacctgtttagcacctgcggcgttactcttgctcgcttaaccgttgtggtctcacaagggtcgtcggacttcacttgtacgtcaaaaaatatccgattcagtatccacagcgctaataacaggattaggggctggtgttccgctcggaatcctgtctatatacgaagtactttgtggaatcgcctgcgcgaatctcccctttctttacaaactagcaatcgggcctttcaagaagtctgcctcttaccactcacgtatcggagagtcagagtccggagcagagtatagagctaggcaaaatagctcacggaggcatacaaaaacactgagtatgcacagtgaagggaggatgctctcacggaatgggaatgattcgacaacattgattgagacacgatccaatcaaaatcccgagatagaactctcaatagtggaacgatcgtattccatgtctcgatcagatagccaagaaatattacggaaataaccatcaattgataaatgcacccaaaatgttggaaacaggcgaaatttattttagattcgatgagaggggaaaaaagtataaaaaaagatattcgacagcacagggatttgaaccctggatctcgaaagaactagatttctcaaattaggattcaagtctagcgccttaaccactcggccatactgtcggaacttattgtgaaaacccgtccgacttgttcctttaaccaaacatgtgcctactagtattttgaagtaatattttccgtattattttcagtattttatccaagtcaatggtattttctcaacatatcaccttcatctcggtgctttccaataagatcgaatcgttatttgtccataaaaaatgttctttctgattcttacattgatctccttttcttatttacaaatattaacctcgttcaactttgccaaaattggcttttttaagctttcttgtcatccatggatagagtgtgggtctttgttgtcttgctgccctcgtctgcgaccccacacatttcctttctttgtacaaacaatactctgtacctccgtgctgcgtgtctcaactgcgtctttctggccctgccgtctcgtcaatattttgtccaatacgtgcctggttaggtatctcgggacctagaaattccgtgccgatcacggggttccgaatcaacacagcaccaacttcgagttgcaacctccaaaccttaagccatgtcaactgcaactagacgaggagtgttttcttccgctatttcaggctacacccgattcattttgcgcgcccggattttgaattcccccagaatgcaccgatcttggtccgcaaatccacgggtttcttttaccacctcaattcaaggtcaggtatggtctccacgggttttcagtctggtaagcctagcttatgctgaatgagattatctattcagaccagagttgggacaagccggatttccacctttataccgccggtcgctggctgttcaacgagactcaacagctagctgaaagacgagtgaacttcaattttgatgaactcgtgagagttgccatggagagcctggatttcggcccccatgtctgcacggaagtggaaaagctccccgacggaaactacagcaaagcattccttctcaccacggaaagcggacatcaactcgtagccaaggttccaaatccgaatgctggtccccttttacacaactgcgagtgaagtcgccaccatggaatttataagttcaatgaccccattgttatggtccttcataataactctgggcaggcaagtaccatcgcaggaattccagtgcccaaagttcatgcctggaataatagcgcagaggataatgctgtcggtgctgagtatattatcatggagaaggcaaatggtgtcttattaagctcacagtgggcaacaatgagcaccgaccagaagcgggagttgatccaaagtatcattgactttgaacgctcccttattgctcattcttttgacatgattggtagcatttactatgaaaatgatctagcgaactccaaagatggatgtttgtcaacttcattccctagatttgcgatcgggccgatagcggatcgcaggttcctggaagatggacgaagtgcgatcgagtcttataaaggaccatgtgcgtttttctacctcttgaccaccaatgcctttgtctgacgtgggttcagctagggaatacaatgattgactatgtccattcgatggcgagtcgcgaagaagattgtagcaaacatcttagccgattccccagaccagaggggatttttggcgcgcccgggtcatatcagcctacggctcaagcaaaactcgatgttatctctgatttccgcaaaattgcatcctttatagttccgaaggacgcgaccgtgacaaagcctgttctctggcataccgacttccatgcggataatatctttgtggatccaaataatccttccaagatttttgctgtcattgactggcaaagcgtacatgtcgctccattgtgccaacaagtgattacacccgcattcctgaatttcaattggccaaagccagatgaaggtctttgtcttccttctcttccagacaatttccagacattgagcgccgaagagaaagccaaagccaaagtcttacgaactcaacaattattatacaaactttatgaaattcaatctggacgacagaataaggatgttttcagagcgcttcagtatcccaacgtacttggatcccagattatttcactcgtatcccaggttttgaacgacggtgaaacaattatcaagggccaattgtttcaacttgttgaacagtggagaacaacagttggcgcagatggaacaccgtgcctgatcacctttactgatgatgatatcgtgcagcaaaatttagatcaagagaagtgggaagaaggtgtgcagctcatggaagatgttctggaagctcttggcggtgcagagaatggttggcaaggctgggtaagtcatgatgagtatgcgcaggcgaaggtcaaattggagatggtgaaggaacagttcttggatcatatggcccataatccagcggagagagaagcacggtgctgggcatggccgtttcaaggtcaagatactcacactgaacatgattggctaagagaggagacaagcaataaccacttgagactttgataaatgccaaggatggcccccaagttgacttcaatataggaaaagtgctcaaaccagctcactccaaatggaatcaaaagcgtttattatattgcacaattacgctcttattcactccatgttaaagctacagaatttaaaaatgcggtctctttgttttcctgctttctttcatcgcctttccacctctactacctttcttcttgaacgcgtctttacattcggattattccaattttttgtgcgccagtagtgtgcttcccaactactatggccgacgtgagggattctgttgaaggaaacgtctctggagacgaggaagacgtggacaagcaaggacttcgggccacagaacacgatctggagcaagccaattccaaggctgtctttaactcgaagaaagcactgtggggattcttggtgctatgctattcggtacgcggggactgatgcttactttggattgacatctgcttgagcgagatgacatgctgataatgcattcgcccaattccagactggcccaacatcttccatggtttcgaattatgtgactgcggccatcctctcggcagccaatctcctgggccaccaggccggatctaacaagccatgctcacgccgtggaacaaacatcagttgtctagtggaattcggtggaggggagatcgactataacagctatacgtgcgtatcgtggcattgaggtgcggggtgactttgctgacgagaagaaagattgtaccttcgagcaatcagtcgcgccatggaaggcatagtatcgattctcacggccggcttagcagactatgccagtgagtagaacgaattgacacctttggatttttagcgctgatccagatacctccagactaccgcaagacgatgatgatgacctcgatatttctgttcggggcattagccttgccttttgcaggactcacgggtcagagttatagccatctgaccgccttgtctgtgctatattgcttcttaacgacggtcggaggtgtctatactgtgatcgaggggtcatacattccgatctttatgagatcgacgggctggttccgtgactcccttgtagcggcaagccaggacgagagagcgacgtggaacaaaggagtctctattagtgttctggctttggtttcgggcaatgtcggtggcttgactgccctgatcatcggtgtcattcttgtgtatgggcgggggtcttatgtgcaggttgggtacttcaactacgttctagccatcacaattgcgggctgcatcacaagtaggttgtacttagttctagatcatgaatccccgatagctgactttcccagtcctgtttgcattccttggccagtaccttctcccatcagtgcccggcaaaaagctcgaccgcacgaaaaacaaattccctctgctgatcgccttcaaaaactggctgaaactgctgaaaagcgtaacgcactattcggaagcattcaaattctgcatcggttgggttctatggaacaccggctattccaaccacctgcagctcatcggcgcgctcttcctccaggtcactggattttcccgcagttccggggtatactcggtctggtcctttaccagcgtgatctttgcctgcacaggcagcttgagcttcatgtatctccaccggcgacttcggctccccgtgaaatcatacgcatatgccttcctcgtggtgaatatcctatgtgtgctgtggggctgcatcggaatcagcaaccatgttacaattggttataagcaccaggtcgagttctgggttgagcaggtcctgttcatgtcgactagtagtgcgcttcgggcgtataaccgtgcaatctactcttccatgattccggagaactcggaagcgcagtttttcggtctggagatcactttggatctcgcgactgggtgggtcaatcctctggtaatgggtattatccaggatcggacgcataatttgcgctttccgatgattccgaacttgtttctgatgcttgttggacttggtctttactcgcaggtggatattggcaaggggatccagcaggcaaaggtaccgttggtacagtaggttgacagagagactggagttgggaggtttgatcatcgttggatagaaaacaggaaaaggcgatcgttcttgcggtcggatacaccgccgatctgtggtgaaggcgtcgcttatgctgaaagctttggtgtcttgtcggggcttttcttgtattgcctggttctcaatatatatttgtcgtgaccaacagtatgaatgacccctggatttcttttccgaccacaaataaccgcagctttagatactcctgttttaattagttcttcgtcgtcgcttgtgttgttatttacggtagaaagtccttttagactgccgacaagtatcacatcgcatactaaagacatatagttgctacatggaaattgaaaagactacggtatattctcttcaagtgatcagttatcataagcagcactaatggtgtagtggtaacatataacacttccaagtaatcatccgactactaagttatgttgtgccgggggttcgattccctcttagtgcattttttgatatttttttctttttcatcgtgacatgagttagaattctattgtctctctctgtacaacgaaagagaagagttaatggattaatgttctgatctcaataactatacattctgcacaatgagttcacatgtaaccagccctatgaaccacctccaccacgtaaaacaatcatctacaccaggtccaagaccaaatagataagtgatctttagttgttacacgtgtatatatacagactatgaagtacagcgcacataaagttgacaatgacattccatatacccataaagcaaaaaataaatcgaacaaaaaccaatgcaagaccacccccatgttcgccgcgaaacgccgtgccatgatgtattggggacaaaaaatcgcgcatcaactgtagggggtactcgcgagaaggggaatcagtcgaagaagatagacaaatgagatgcgagagatgacaaaagagacaaaaaaaaaatacgacaaatgagatggcagacaaaagaaaccctcaaccagcccagctcccattttgtccagcagagtagagacaagctaatccgagaaagctgtcatgagatgggatatgatagatgcggttgaagcaaaatcagaaaacaatgcggatgggatattcgggcacataaacataggaacaaaggaaacaaaaagggaaacaacaccgggaaatgagatcgtgtactttttcatgtccagcatctgggaaacaaaataaaacgagacgtgggaaaggagattcaaccaaggaaatgaattgtccatggggttattttctcggtgctcgcaccggaaatgaccaaatggcgcaatgattagtccctgtagaccctgctacagaggattcgagtatgattatacagtacaaggaggaactccagcctccgattggtatcagtatcaggttgtagatgggatgggagcagtgccagtattagccgttgaccatgtcatccagggccatcttgcgccgtttgatcggtctgttgtcgtgaccttcagcttccatgctgggcggttcggccctcgtcagagaaggcgagtggccagatgctatctggatcggggatggcagttccactgggccaaggtggcggggtatgggatccatagttgcgcttgttatggaggaggagcgttggtgggggagagggtagttgaagaccgggcctgcagatctgtggagaggtagagcgcgggggtcgtaaaggggttcttcccggcctgggagagtccaattcattgggtacgggtcgctcaggcgatggacatggtgaggagggggtggcccagctgtggcttggtggattggggggagccggactggagattcgacggtatatggatcccgaggtgatagtgatacccgtgaatcatttgccgttgggcggataggattgccaggcgtctcagtatacggtagaaagggcataccgactggtggtggctgatgttgaggaggtgatgttggtggtggtaatgctgggacaccgtatgtttggaatcgtcgatccatgccaccggacatagtgttgacttttaagaccggattcaaccctgccattggcatgtacggcgaaggtacatgtgagtgcgtcggtaccgaataagatggcggtccagatgaagagaatgggcgtcgaatcatacccgggacattgggcgagaggtccataggccgcgtgagaggaaataccgaagcggaccaccggtgtggtgtccgtattcccgagctgacatctcccaatccctgtagatccgtcatgggacgcagttctcgtgaagaagtggcccgatgcatagcggtccgccgcgggggcatagttggctgagcctccgctgggacagccgggttatccaagtgcgtggtgtatgacttgacagatgaatcctctgcttttaatgggggccgtcctcgctttttgtgcgtgacgtccacacatgttgactttcctgctcgttagttacaattccactattcatgagaattcattaacacttacagcctttccagcaagcacacatcttcgacatggacgggctgggtcacatccaagatgctttttcttgcaattgacacaagctgatgccacatgggcctttgtacgtcgggttgatttctgtgctagtgatcggcctgtgggatgcgttgggtccaatgttggtgctcctgctagcaatggagatccagcatacaccggtccctgttcgttatatccccgtgacagtggctcattaaccggtatttgcgatagctccaataccggcacagcagaccgctccgtgaatccgagagagggaggatatccccgagggatctctgcggatagctccgagggctttgctggaggagatccagacatagattggtggggtatcggagcccgggggctgcaccctcgagcattgggggtccaagatcgattcaacggcagccgctctgggccctggttgaatcggggctgtccgaattgggatatagtgaggctcggggggtgaagcacgagtgagtgcatcggatgtcaagcaggaaagggaaagggcccacggggcaaatgcttctttcggcctttttttgttttttccttttttttttcgttctcggtcttgctggattccgaagtatatcttggttcaatttcacaagcagagaccgctgaattgcgcggttttttgagacagcatgtctgagtaatagatctgggagtaactagcgacacagaaagcgcggtgtagggagaatagaaaagagccagaggtcatcaaagttcttccaatgccgtccgaggacccaagcttataatcaaggtggatcgatccgctattggaggagtcagaaaatagactgcatcgatggggagatttctagatgacagcagggcacagggttactcatacgcatgtcttccctagggcgacttattgcaggatggcggtcgatcattgagctaggatcaaggtgcagtaaaatgtcaaagtccccaccccacgccttacctcttgatcacacgttccacgttcctcgagggtatttttgtgtaaaggggagaaaacggtgaagtatatgaccgaaagtggtgcgaggtcgcccaaagtaggggaataaaaagtacacccccacttgaatgttcccaaggcgttcgatagtccaaacgaaccgctgaactatcacacaataagcagtgtaggaaagagtagtggtccatgcaggcgctagtagctgatagatttgatcttcgtcatggtagatcattggagaataatgggtttaacgggtgcccctccttagactcctttctttggaggcctggtattagatacattcgatactgaaaaaagagaataaagaatatattgcctcctctccctcctcccccctcccccctnnnnnnnnnnnnnnnnnnnnnnnnnnnnnnnnnnnnnnnnnnnnnnnnnnnnnnnnnnnnnnnnnnnnnnnnnnnnnnnnnnnnnnnnnnnnnnnnnnnnnnnnnnnnnnnnnnnnnnnnnnnnnnnnnnnnnnnnnnnnnnnnnnnnnnnnnnnnnnnnnnnnnnnnnnnnnnnnnnnnnnnnnnnnnnnnnnnnnnnnnnnnnnnnnnnnnnnnnnnnnnnnnnnnnnnnnnnnnnnnnnnnnnnnnnnnnnnnnnnccccctccccctctcctatctaggacatcgagggcgtgcatttgacagaacgctgtcagtgccacccccccgagcgggtaaagggaagggattgaatgccactagtcaacggatagttcttttcccttttctttttctcgttttttccatttttccgttcggagaggggtgacagtgtataccaatcagggctaagcaaggtggaagattgacggatcgacgtcggtgcccgcagccattgccaatagtcgacctcggcgtggactatgcgcattccgagtacgggaggacatgtactccgtattttacgcatttaattctattctagattggatctaagatagcaggagagtcggataggaggatagtaacctcattgaattgtcgctggtggtcttagggttgcaatcgggaggtcaccttgaccttcacgtctcctttgggcaattataaggtcaatcggagttctttcgccttagactttgtgtcttgaatatttaatttccattgaaatgtcctattccttcttccccagcgaattaatcgccctaaatctagccaatctgaatatttcgactccacaacatcgcccggcagttcgatgatctcccacttaaaccctttaaatgctcctaaaacccttgaacccttttaaacattgagaaatccccttattctccgatccacccgggtaaatcattgtatgaccgagtcgatccttttatgctccgtctaggggttactgttacaatcgcagatcagagatggaaaggtctcacagggttttgaccgtggtcgagtcggacaagtgcaggcaccgtaaatgtccccttttttctcctttttctcctttttctttttggggattttctggaaataggttgcgggtgtgataccgagtctcgcaataatcagtttcctgtgatacccacacttggggggcgtttttctcgcttttttttctctgcgcttagactcggactttgtattggaaccggtggagtgatattgaggaaagagaagaagcagagggtcctgaacggtcttaaatggtcccaagggctccaaggagaatatctggaaaaggactcggtgtctttatttttccggggaccccaacagcgatgtggctgcagccgggcgatcacattcgatcacattgtcctttgcctctgctctgcgcgtgcgcatgccgatcaccatccctggctttggaactgcaggattccttggatctcacgtcatggggagggagtgtgtggtatatccagagcctaatagctgatctcctcctattcgttgtatcgatataaccactctatggtgttataatatagcatagagtggtgtgatcatatcactagttcatgtatatataaactcggcaggatccgatcaagggaaaaggggtgtggaacatgcggcacgcggagcagcaaggggtctgtcaccccgttcatgcaggatattaaatagtctagacaattatacggttggttgctttgtgaatcttttccactgccaatcataagcctattcgtctgttatttgtgcagtttatactaactccgacctctcgcggtatagtgttgtagccgccgacgtgcccaaagtccagaccagactatgttatagtccagactctattaatttgacgagtggagctcatcactagcactatttaattcttttaatctaaattcctgatcagatcaaaaatcgccgaatcattggtttttagcgttaaatagttccggttagtacggagattattcggaacttgggagaattctcctagtgcaacgtctaaaacttgagacaatgtctatagtttctatagttccatatacttaattaacttgacgtgccgccaatccagatctgggcatcgatggacatcctctaacctcttaacggtgaccaaagcgtgtgattgggctgatatcacatcttcctccatcacggcccatattgatctacagtttaaacgtgatggcctggcccagtgccaatgttgagtcagtcacatttccaatcggtctccggatactccgttggagtctaggctacacagcttcttccatgtgctgagctgggcggttcctaaatctcggattcatactttggacatcggaataaaatctccgaaacacaaattgtggtatctctgcaatatagacatctattctacagtaaactttttcctccgtaatcccctagcgtctcttcgacggccgggcattcttatcgcgacgctgttgcacctgcttccgcgccttgcgaatatcctccgtagaccgaagttcgctctttccgccgtatgccgctccaccaagcttatcgtgctggcgttcgcgcgccgcgtcgttcttcttcttcatcttgtcgtagtcgccacgcagaggatcggcccgcttaggcgcccggtcctggctgtgtcggaatcggccactgctcatgcgcgagttgacgttgttcatattaggcgtctcggcctcgccaacacgaggcatccgatcaacgcgcttgcccttcttccaggcctggaagcgaccgctgcggaaactggcggcgatcttggctccactctcgccgcgcacgagtcggctgcccttggaaccgtcctcgtcgttctggcgggcaacgtacttcttgtgtcgcttgtcccagcgcatgatggaacgcgcttcgccgaacccgcgcttgccttcgtcgccgttgaggtccatagtcgcgttgcgggagtcgctggcaaagttcgagttggtacccgagtgcacaccgtaagccttatcttcggccatgtcgttgtgctgaggtgtgtagcccatgaaataatccgggttctggaatgctgctgctgcgtcttttttctcgccttgcttggacttggagttgtacgcagagaaagtgacttcgaggtcatcgtcggatgcgtctgacatgttctcgccggcatgctcggggatgtcctcgtcctccacttgaccatccgggccgggagtgggcattccaagcgctgccaactcggcctctgctttggcatccgctcgctttctcttgttctcgacactagtgcggagtcggcgaatggtgtcaacggcctcgttgtcagccactttgccgcctcgtcggttgttcgcctcgaaaatcgtttcatgtgggcggtaaccaccaatgcgggccagcatactctctcgctctacttccctctcagtggttgcatcattgaagagcgggtgaatctcagcccagtgatcagaagacacaacatccttggcccgtttggcactctcggcagaagccgagttgcgggtgcgcagatatagcttctctcccttttgagacactcccttttgtccgtaaatatctatatcatcgtcgagcaccttctgtacccattcgcaagtgcgagagattgcctctctcggcagcgttcccacgacaacatcctctgcaaagttgacttcagtgccatactgacgaccgaggaccaacctgcgtcccaagaacagctgaagatccagaagatacggggcatctttgtcgcgaacaagactgtaactccaacccttttggcctgcacgagccgtacgaccgacacggtgaatgaagatcttgggctgtgaggggaaatcgtagttgatgacgttggcaagaacaggaatatcaatacctctggcggccacatcggtgacgactaggatatttgagattccggatcggaagttttgaacatggtgattacgagcagtctgatccagggaaccgtaggcgtaagaggtggcaaaccctgcctcggtgagaagagagtagaggtagtcgacgtgatgcttggttgcagcgaacacaatagttgagtgctcggtaggtgactccttgaagccgctcgggagacggacatccgatctcttgcgcttccttgtcgggttctcggcttcttggcgtaatctcccgccaatatatgtctcaccggtaggcatcttgataatgttatgcaaaatatgtagtagggcaccttctttatctgccgacttcacagcaaagaaggcattttgtagatccggagaaactttgttctcgatgtccagacgaattagacttggctcttggagaccagcacgagcaaattcgacaagcgacttgggcaatgtagcggaaaagagaagagtctggcggttcgtgggcaggccgtgcaaaatctcggtcaactgtgcggcgaaacccatttcgaacagtctgtcggcttcatcgaagacaacatacttgatgctagaaagatccatgtccatttcgaccttcaagtgcaggaatcgaccgggtgttgcgatgatgatatcggggttgttggccatcatgccgaactgatcttccagactgtcaccaccaatgagaagcaccgatgtcaaatttgttcccttgcccatctccttaacgaccttcatggtttgtagagccaattcacgggatggggacatgataagagcacgtgcaccgaacgaggtgctatggctcttcaacttctcaatcataggaataacaaacgaggcagtctttccggaaccagttcgagccataccaaccacatccttgtcgtccatgatcatgggaatagtctttcgctgaatcggggtaggcacggaaaatcctttgcgggtgatcgctttcagcagactcatgctgagacccattgcctggaaaccaccacccttcttcaccgtacggcccttgagatttgcgccctttcggttggcggacgcctgcgagttcgcaatgaaagccgcatcgccgtcgtcttcgtttaaaaagtcaagatcttggtgggtatcgggcttctggggctttttcttggggggtggctttgcgccgtcatcggaatcgctgtcatgttcaaaaagggattttgtgatgtcgaactcgacctccgattctgcgggtgaggcagcacggggagccattgttgcggtatgctgtgaagtctcgactgatatggaaatgcagtgataagcgttagaccgtttggctcttcaatggccggggaatatgaaacacagaaagattggcagtgattaattaatgtatcacgcgaacaaatcctcgactactcaaacttcagacacctgaagaaaagtcgagtcgcttatctcgctgtctttctgtcgcaaaaaaaaagttgagagaatcgtaggcggtgaataccggatcaaccatcgcccgcgtgcaaactaaacaaacagaatttatacaatttgcgctgaatgtggtcatagaaacattgtctatttggagtttcaaagatttacagagacaagactgtactatacatctaatatgtacctaatatgtacctgcattgtggttcgaaatctccagcagctactcgatgtgcagcccagctggatgaagacacattggacagtccttttgaaatttcaagatagtaatcatcaaaagatagcattttaagagtaatcaatcactacaaaagtcaatatagcatctataatgtcgaagttcagagcagacgattttaagtagatccaattcgagaggcggtctgaaatggcaaaacacgatccccgcgacgcgtgcgacacgctcccaattaagtaaaatggtgttgaagaaacagctgtaccttgacctttccccttcacaatctcacatacaccatgggtatgtaccactctaaatctaagctattactctagccatatctaataatattgtcagacggcagttacaacaattatagctcctcattcggcgggggtggaggattcatgccgggcgaggcgaacagtcccgcgggaggcaaggtatacacatgatccaggcctgtctttacaacaccaactgatatccaacgcagaccggtgaccgagacaacaaaacccttcgacccgtgacagcgaaacaagtcctcgatgcctcgcagcccttccccgaagccccatttcaaatcgacggcgccgacgtcgccaatgtcctcctcatgggccaaatacgcaacatcagctcgcagagcacaaacgtcacgtacaagattgacgacggcacgggcgaggtcgaggtcaagaaatgggtcgactcagccaccgcagactccatggacaccgacgatggcaaggcgcccgccgatgggaagaccgaggtcgagctcaacggtcacgcacgggtctttggttccatcaagtcctttggtaacaagcggtacattggtgctcattctgttcggcctttgacggatatcaatgagctgcatacccatctgctcgaggccacggctgtgcatttgttcttcactcgcggcccgcctggtggtggtggtggtgctgctgctggcaatgctggcggtgttgatgctgttatgggtggtgcggatgattacggtgctgggcagaataaggctcttgcttcgatgtcgcttgttgcgaagaagatttataacctgctcaagacggagcctcaggatgatacgggcctacatatgcaggtcattgcttctaaattgaacatgcctgcgtctgaagtgggtagggctggcgaggagttgcttggggctggtgtgatcttttctactatggacgagcagacgtgggctattctggaatactagagatgagtggttgtgtctttaaacgtcacattcagactccaatgatattatgatttgtcttgtataacacttgatagagtcgaaacatgtagcaaaattgacaacaggcttgggtcaaaacaagattggaacataaatcacttgaagccgctaatgcaaaacgagatataaagaacatatgctggaagatttgaccattttcgtcatgaactgcatatcaagtcgtgtgcatgcttctcatataccaagggtcaagttaggtcaactcattcctcttgatagcttcctcgaccgagcgattccaattagctcgactgataaaggtggcctcgatgagcgaaacaaggcccaatgcaagcgcaactccagtccacaagcccataacaccccaacccaaagcaaaggttgttcccatactaagcggcatggcaatcacatagtaacagaagagttggatatagccgcccacctcctggcgacccagaccacggagaataccgttgcagtttgccgagagagcgtcgaaaagctggaaggctgcgcagagcggaagcacctgcgctacaatttcgacgacttcgggatcggagctgaacaacctagggatataggaccgcaaagtcgagagaaggaccatgttgaacacgccaacgatggctgctccgaagaagctcactttcgcagaggtctttgcggcatcgaccaaggtagccccgatcagatttgctatccgcgtgctacctgcaatagatagggggaacggaatctgccatgtaatgctggagattgttgctaggatggactgcgctgcgagtgcggatgtgccgaggtagcttgatgccagcgtcaaaatttcaaatgccaggcactctgcctcgaccatgatcagccctgggagggcgagacggatcattgggccccagttctggaatgctcgtctggtgaatccgcaccaacactcggatcccacgaagaaataaacatagatgaacaggcaaagcgggaggagattttcggttattacgacggcgattggcgccccaatgaagccccattgaagtttcttttatacaagtcagtattgtcctcgtaaaaggctggaaagtacctacccagacgaagaaccagttcatgaacgcattcagtggcgcgcagaaaatgaggacatatagggaggcagaaaacacaccctgggcctggagatatcgcttgccactctcgaaaagagcgaatcccggggtgcccaagagagcaaccttcaaatacagacccgccatctgggcgacctccttctctggcacgatcttggcaaggatatgctcagagaaataccagagaaacatgatcggaatggtgataacccaaaggaaatacaccatacgcagcatctgcaggcccaccaactttctctttccagagccgtaggcctgcgcacagagggtatccaaactagttgacagacccgagtacaccgcatttccagtaattgtcacagtcatactcgccagactgacagctccaagctcttcctttcccagatggccaatggtaaagatactagccacagtcaaagaatactgcagtaagaaagtgaccatgagcggcaaagagtatttcataatgacctttgcttcgcgctgccatgtcgtctggatcaaaccggctgcgacggcctctccccatttccgatcaatctcttccgagtccaatccactgtcctcggcatcggaagtccgctctctaagtagagcagtgatttcgcttgccgcgtccgactcatgatcactgcttctcgagcgtcgagaagctccacttggccgtcgagaccgggatccttggccgataatattgttgtcactcagtagctgccgttcctctccgatgacttgatcgcgctcgctttgggaaatggcttgctgttccccagcccatgggaccacagtcgcatggctgacagatgtcacataactcgggcggcgatatgaaccggctaaagagcgggggttggtgctggtatagctgtcgatccggcgggctgttgaagtgtcggaatcttcatcggtgggtgttcgatcctcctcgctgtagtctgcgaggtctcgggcaattgctgaggcggcaatgggcgagctggatgtgaaggaacgaccaaatgggctttgatactcggcggaatccaccgagcggatgttgcgggccatgataagatgtgagagacgagtctatgggtgttttacggccaccgcattatttacagccagataattgagctatctcggggtgagactctagatccttggagctttggagatatcgaaggcaaaaagcctgcagagaaaaagacggcctaaagctggatgcggagatgtatttgtaataccagcaatacgaccggtccaggtgcagacactctgtatatcgtgtaatttaccgaaacagcccccgagtgataatgcagataacacttcagtaagggatgtgagtcaaccaccggagcgtgtgattggctgtcactatcacatacaaggttcttctttactaaatccagtgcccgaagacgacgctaaatcataatcgcttcttcctaaaccccgctaacacttagtgggaagctcgatgcgggcagtgtcgccgtgatctcacttgatatggccacccccactatgttgtaccggacatgaactcacggcctagcggtaaaggcatcgttagtaaggatatgatctcggccacttcaacaatcgcgtcgctatgtatataaccgaggtgatattaccataaagaacgagcatagatctgcatacaagaacctgatcacgatcgtcctagtaatgtgtgaacgctggggctgtcgatcctcagacctgatcgtacatccatactccatactccgtacagcatactccgtacaacataacagatgagcaatcagaaacgactgtgacatcattcccaaaacagtataggctatcacatgaccggcctttgaccccgtccccgggttttctccagacttcggggatgaccgagcgtgtatcaaccctctcaccatgtcactaatggtgacacaagtaggggttggtcgtgctcgcttcaaccctttggtcaacccggtaaattcgaagccggtcctcgtggaagagtaagtcctaaactgtccaagcaatcgccgaacgagcgcgaaatggctggagagcagaacaatggcttggtcccttacatgacgctgtacttcaaaattaaagcctggcatgcgccatgaaagccatgattgccatgatttacacacgccccacgccacattctgccgcagtgacaggccagcccggttgacaattttaaagacacatcgagtcccagcaccacatcttcctctcacgcccttacctcggcgcgctcttattcgaaaacagctcttccgatgcccgcgaccactgcgccaacgagcgcactttcctttcatggctccgtctgtcgatgtatctggcgatcgtgtcgatggccatcatcatctccttccatttccgcgatcaacccaccggcctagagagacgcatggccttaccgctcgggatcatcttttggattctgagcttgacctgtttggctaatgggtttgcgaattactcgcgtacggtcaggaagtacgcgcgcaaggcggctttggtgcagagtggttggaaaacgcaggttgtctttacggtcgttgggacggtcattctgggcagttgcatcttgtttttgtccacagatccagcgcggtaatggtcgttctggggtcggatttgtcgatttattccattagcgctggcgttggtattcttgggcattttggttgctttctacattcgttattgtattattgtatttaatgtccagatcaggtctcagagactacttggtaatattcaaagaaaactcgaaaaatctcagaaccaagcgttgaatatattgtaattttctcctaaaataaacagagaggccaaagatcagattatgatgtcgcgagaagcgtcttgtgtgcagaggtatatttccatgaatctcgtaaaggaggctgggtttgctccagggaatgcaaatgacaaaagaaacagcgcatagaccgaaatggaaccaaattatacgataaactatacgtcgggacatttacatccgacggatttcccgctcattcttgtacttctccagggctggtgtaccgaggtggctccaccactcgaagagcatggagttgcagataagcttgaaccagggggtaaatgtcaaaccgggctgctcgaacattgccttaagctcatcagctgagacgtaggtggtgtctcggacctcgttggggctgggatccagatcgacatgggcctggatgaagaggatatagtccactagcaaaatgtcagtatttccatcgaatcagatctatattgcatgtaacataccctcgtgctcaccccactttccatcgctgggggccttgtagtgaattcgggtgaagaattcaaatttgtccaggggtacttgctctgccttaatgcccagttcgtggtccagcttgcgctgcgcagcacgcttcacacccagtacggcagcatcgagctcagctccagtctcgccgggaatgccaagggggtgtgagcagcaagtgttggtccacatatcagggaaggtgatcttctcggtggcgcgctgttggagcagaagacgcttattggagtcgaaaaggaaaactgaaaaggcacgatgaaggagacccttgtcgatgttggtcattaaatggcctatgcaaatgcaactgtcagtgtttttatcttgccatgttgtgtccactaccccgccattctgtacatctgtgggtgattataggatgcgaaacatacaaatcttcttgctggcgcttccaatcggccggtcattgttatccaaaacaatgcagacctcgtccatcaggcggacctgctcttcatcgtatccctctagttcgctgccgcgcgcagtgtttgtttggcttatcgggaggacctcacgggcgagcgatgtatcgacctcgggaaagagagtggcgacattgtccgccgtgatctcaggcgggcttgtgattgtcatggttgcgctcattttgactgaaaactaaggctgaaaagcaaagctgaaagaaagaatgagaatcccaaagaaagaattcggaggaaatgcggtcttgggtcaaaggcggcaatgatcggcaaatttgcctcggattccatccgcaaggttgttggccgggggaacttgggattgggaatctccagacaacattctaccaaggacaatctatggcttacaaaaagtgactatataaagatcagaaatttcattcaaggctagatctatctgtgtgcgaaggccaaaagcatcaattcacaccaagccatcatgggcatcaagatagccttgatcacttcagttcaaggagactagtcaacttctccaattctgcaacttcctctggccccaaaaggcccaacttctcccgccgagttggcgcattcgggtcaaacacaggcttctcagcgagcgaagtcacccgtgttccgtgtctaggctgggatccctcataatcccagcttgcgttatggatcgtgatgctattgaaaataagcttcaaatccaagacctttcagagtattgactaaccggttatcccacaatgcactcgtgcgtggactccatttaaaccgaacctggatatcagggttcttctcataaacgtcgtataggtatcccagaatcacatcactttcggccttgtcaagcccaacgattcggtctgtcatcgaccggttcacccacagtgccttccagcctgtagctggatgaacacggacaatagggtgctcgcgctccacatactgaggccctgcttccgggtccttacgatcgagatatgggtgagctgagcggtagatggcagtccttccgtcaataaacttgcggaataatggcgacagcttctcatatgcggcgtatccactcgcccagagggtgtcacccccgactgtcggcactgtgtcgttgtggagatgggtcactccggcgggctgtctctcgtgtacgagatcgctatgccagcgagacgctcctcccggccgacggaagctcgctggtctctctgttgcctgcaatgctggccacataacactaacgccggggaggccagggacttgaggaacttgcggctagaagaaacacagttggtgattcgcacatggattcgctgggttggaaaaaacatacatgaacctcaatctctccgaaccactctcctagttccttctgttgctgaggagtaatatcctagtctcggaagaagacaacacttcgttcggcaatcaataagcctagctcatccttctgctggtctgtcaaatccttcagctgcaagccgacgatttcagttccaatgtgcctagtcaagtcaatcacttccttggctgcagacagaagtgctttcttctcgggatcggctcggctgccggggtctacatggacgcgatcatagtttcgcacgttgtaaacgtcgtcaatatagaggggacgagatggccggtacgggtagccatcgctgagatcaatcccagccttttctaggcgttctcgtgcagacacaggaaggccgagagtgtccttcttgggcactacgacgtcgacgatgcgtgcatcaattggagcgggagccatgatgatagataatatttggaatagtataaatcctatgagtcctaatatcaagcctacatgcagtgctatatactctgtttagaaatgtcgacttgcttattgatcaacgttgtacaactggggtttgagcacatcatcgccatcaaccatcacgtcttttgcgggccacgcatgtcacttttagttatctccggctgccatcctcatacccctcttttaggacttgtaaattgtccaatctatactgctatgtgtacttagtcgaagcggggaagcttcgatgtcacaatccaatatcaaaatcacgagtatctctaatatctaactcgctgccgtttgttccgggaagcatggcgatatatcagcccatgttgtcgtttggagggcccataagtgcgcgaacaatccacgtagacgcggatatgcaaattatctctttgtctttcttttcgcttgataatcatgagtgagtccgttcgagttgctgttattggggctgggatcagtggagtggttactgctgggcatcttctggcagctggaattcaggtgacggtgtttgagaggaacaatgcaactggtggagtttggtaagatggtgaattgtttattttgatctggaataatggactaaagcattgtaggatttatgataagcgtactccgattgaagcccagtacccatcgccaagaccgtctgcttcacaggaatatgtgaaggatgagagggaagggaatgaaagaaaggtcttgcttcatgcgcctccggggtaggtttctgatttatgtttttttttaactatagcaggcgtactcactattgaccaggccttgttatgaaagtctcaccaataatgtctcgacacccttactacggaccaaactcaacgcatggccagaaggaactgctccttttgtgaagcataatgtgctcaaggaatacatccaagacacgtcgaagaaggccggtgttgatgatataaccaagtttggcgcccgagtgacccgcgtccataaggatggaccaaaatggacggttcactggagcactttgagcgaaggccaagatcccaccgagaaggaggagtctgcagtaagttctcatatctataaaatttttcattctcagtggttctgaccggatcatagacgtttgactcggtgattgttgcctcgggccattaccatacgcctctcgtcccgaatatacggggtctaccagaggcaaaagcccaatggccggagaggatcttccattcaaagtctttccgaaggtcggaaggattcaaaggaaaggtaggagcgactgcattctagtattgagtggcactgaactgactcaactacagaatgtacttttgctcggtggaggtgtctcttctctcgacatagccactgaaatcagtggaaccgcacatcacgtgtaccaaagcacccgaaatggtgccttcgatctccccgagagtgcacttccagaaaacgcatcaagaatcgccgaggtcgaagcattcgaaccttctacatcgacatccgcgaacaccgagcacttgcccttaaccgtacatctcaaatccggggagaccttgcacggtatagacacaattattctttgcacaggatatcaaatggcacttccattcctcgacgaatataatgattacacttcgtctgcggccgaggcaaatgataccgtgctcgtcacagatggcactcaagtccacaacttgcatcaagacatcttctacatcccagatcccacgctggcgtttgtcggcattccattctacaccgcgaccttctctctattcgagttccaagctatcgccgtgacagccttcctgtctggagttgcgcagcttccatctactgcgagtctccggacggaatatgagaatcgggttaaagagaagggacttggacggagcttccactcactcaaggataaagagcaaccgtatgtcgaggaattgatcaaatgggttaatactggaagagctgagcgtggtttgcctttgattgagggtcatactgagagctggattacagagagagcggctttgaccgagagacttaagttgattctggcaggaaagcttcctagggcggatattctcaaaagcccattggaggtgggggttactgcatgacctattagaatatagacattgaaagcattcagagaagtgatattcgtagtttcttgactgtaacgtatccccggaggctctgccaaggcaggtgcgatcctgctccttcccatgttacgccttcctctcgaggtctcttcatctctccacctatgttctttcccctttagcatgcgatatcacatatttacctcatcctgggaccatgagcccacagcttcaacggcaaggcaggaatgggcccgcgcctacctttgcgggtccttcacccggggtaagcacgtcccaacgtccctcagttctaattcaacccccaagccacatatgacaaggtcaccgcaacggcctgcaactaggcttaccataaccgtaaggtcgcgcagtcgagttctcaggcagccacgagcacgcagaccgagcttgataagaacgacccacgtccccgacttcatatcattgttgacgccaacggagattcggctgtacgagcgcatgtcactaataaagcttagataaaatataacgtgtttcgatatgtcggttcggaaatatgagatatatggcgagatgtgcaggggcgatggcgagtttctagcttgggatgacaacatcatcaccacaaatcattccccaagttggccaagcgcccaagactggacatctcgcacggattatgttgaaaaaacttgcatgaattgcgcgaacaagtcgccccttcattcgacgtgaaaattgtccgcttgatgcggagtataaatcttgaagcatgattcactcggctttaaaaagggccccgatatggctccattctatgctgacacaagctttgacaagacgatcactgactaggtaggctggccttgtcaggttagtaagtctttgatattaatcgcctgttagacttggtagtttttctgcgctataagaacgttccgatgtctccaatccaatcttttttctcattgccacgacatcaccatgtcgctaaaataccctactgaagctgttgtcgatccggcgacacagatagttcaaaaagaacccaagcgcaaatgggtcagctacatttgggacacatttgacaagtcaccacaggagcgtcgcctgcttttcaaattggattcggccattttgacctttgcatcgttgggtaagtttcatgaaactaattatcttggaaaatgctaatagtcataggatacttcatcaagtatctggatcaaatcaatatcaacaatgcatttgtctctgggatgtatggtaccatattgacccaatctcgggagtttgatattgacaactcataggaaggaagatttgggcatgtacggcaatgaactcaactacatgcagacatgctggactatcggctacgtcattggagaaatccctagcaatatactcctaactcgcatcaaaccacgatattggattccggctatggaggtaagaggttctggttctattttcgagagctgtatacttacttctcaacagcttctttggacggttcttacaatgtcgttgtcacggtgcaacactcctactcatttctatgttcttagatttttcgttggtatgcaataacttcaagcacttactctatcatagtgggttattgacattgcaacactataggtatcgccgagagtaccttctatcccggaatgcagtatatcatcggctcctggtaccggaaagatgagttggcaaaacggtcatgcatatttcacacgagcagcggaattgccagtatgttttctggttatctgatggacgcggttttccacctcggaggacgaggaggcttcaagggctggcaatggtaagaaactggcaaagtctcggcattgggtcatatactaactaccatcaaggctttttattatcgacggggtcatttccctgcccgtggctattagtggattctttatccttcccgatgtgcctgagatctccaatccatggtatttgagtaaagaggcaagtttgctttcaaaccttcgcatttgatacaggtattgacatcaaagtaggaggtcactctcgctcaaacgcgaatgaaattagaaggaagacagaacagacagccatacacaaagtcaaagctgaagaaaatctttacgtcgtggcacatttatcttctgacattgctctacatgtgagttgaatactggaatccatctaggactaaaagactgactcaccaattttagatgtttcaacaatggtgccgctggaagccagcctatcttccaacagttcctcaaagactcaaaagatcctgtatattcagtcagccagatcaactcgctaccaaccaccaccccagccattcaagtcgtgacaaccctcgcttacgcgtggatatcggatactgtcctaaacggcaaacgttggcccccgatcatcttcggtgctgtgagtgtaacaccacataaggaaatgatagaaaaatctaacactgtcccagtgcgtcaacatcataagctacgtctcgctcgcagtgtggaacattccgttgggatggaaatggacatgctacattatcagcggagctggatatggactcagtggtctgttaatggcgtaagtcatatattccccaggctataaaagtgcaaatgtcctaacacaattaccacagctgggcccatgagatatgctctgacgataatgaagagcgatccttggttatcggaagcatgaacgaaatggcgtatgttttccaagcatggctgcctcttgtcgtttggcagcaggtcgatgcgccggaataccgcaagggctttatcacggtcaccgttctgtttgtaatcttgatcatcagtacttttgttgtgcgcttccttcacaaaagagagaaattgagaaaagggtaagtatcttgaaagtgtgttatgcttttaggctcgtgcttgctaactgatgtggtatataggaaccagactcacgaggcagaggagacggaagataacttgtcagattctgcagaaacaaccgatattgagacgaaggctatcaagtcttaggatattgatgttgttcatctatgcttcctgagatggatataccaaatggagaatagacagatagactcaaaggttaaaagtacgtataagttcccttaatcaatcaaaattctagagacatgaacggagtaacagagaccaggctttttctattgtcgacttggagagtagtccatatccaatgataatgctaaatattgatgagccaagcgttacaagttacaagcatatgttatcttatttcccaaccattttccaggctcgtctgacatctagtaagccccttatttaagattgagcacgaactccgacggagtataaaccaacaatctcggctacaagaccgtgtgatgagtcgtggtagcgtgtgatgtgatcgaatacccatgtcgatacccaagatcaaccaatcagatctccagtctccttaggatcttgatacaaagcccggtggttcaaccatacattatcgacttcggataacgcttaccgatctgactgataattggattgtccctgcatgtcgtcaatcctccatactccgtcgatgagagcattatcgcaatctagaaagatagccaggatttccgaagatccgaatctaaactcaggggtagattataggaataaatcgatagctcaagctagccacccgtgtggtgccgatttcaaagccgttgaaagtacggagtggtgttagtggcgttgcggactagtgaaggggatggacatatcctgaagtacaaattccaaaattatgatagcccttttgaaattgagagctccatcacaaaatgagacggtgggacaaggattctcttgttcctattcctggcccctagttcattgcggatacggaggaatccgtagagatcggcattgattccttttgggcaataatctcgagcttggacttttcttttttccagcttttttctctagcttggggccatagctccgatggggaatcatagggatctgcaaatcgaatgtgggaatattgagagacagcttcttattagctatgctatacctatatctccctgctcaatgtatcaacgtacttttttacctttgctccatacaatcccacccggagcaaacaggaaaatgattgccgatagggtaataagtacaaacgcctcatctcggagagcctatcgtggaagggatatatgactcctggattttccgggcccactcgcgaatctcaggggcaatggaatcggtacctgactctgctatattagacattcggatgtagtttatgatcacggaccattttctaaataggcgaacagacgcgatgtctcctgcgcggctgcaccggaggcacaattccaaatggtcaattgtggtttggactccacttagcggagatagcggggtggaagagaggattctggacaagaataatgactatttgtttaggaacgtcggattcccactctattttcccgtgcgagcaaggattaataaattgcaggaggtcagggctagaagtgagacacaacgcgatacttcacctggggatttgcgctttttttgtcggcacttgcgaaaacagagaacggagcaagagcgcttttgaaaacactaagacagttagagttgtttcacagtcttccttcaaagatcgtctgaatgtcgacgatccctcttaatcttagcgtgtgagtcggcgttcttaggtggagcgcggcaagagtcgagatcccaacgggcctcgaagagtcgaagagggggaaggggggtagtttttgagtcggaggcgatccctgggaataattccttggtgaatttctgttctcgtggaaataagtccaatttccacgcagaacaatgtccttttgggtctctcgtacgagtcgttggtccggacttgcattcatacacaatatgtatgttgtactggtcaacttcaaagacttccaagactctgatcttcagcatccctgctacagaccatgcagatcttgagctagaagtgatgagatattccttgctacccgcgcgccagctcatgcgcatgcaaatgatatcacattcgaacatgggaaatatgtacggggtaatatatcaaacagtagtatagtcaatttagtcaattgaaatgaattaaacaatgcgataagcaaaaaagaccacctgcagtacaataatccagaattccaaccaaatgcatcgtatagcaatccaacaacgccaaggaaatggggcttcatgccatgaaatatatgaatcctcataggagtctcgcattcatgaagcccagtaaaaaaaatagaaaatttgagtagctctgactagcagatcccagaatggcaaacccatgcaatccaagaaccatagccaaagacgatatatcccgatattcgtttaacatgcagacatgtgatcagctgtccgagctactagctagctgagcggcggtgattcggcactcgttggcgttgcttgggcgtgagcgaaggatcaacgtggccggtaaacttcgcagtgttgcgctgcttctccgcacaatcatgtctattgctcatattagtcccacgagtacacattcaaggataaatattctgggttcttacctggctagactatcctgacgactgaaacgccggtcgcaagagtcacagcagtacttccgaagcccgagatgaacctagagaccttgttagtgtctatgcttgattccgtctggcctccctactcacggtgttcatgtgtcgtttgagatccgagctccggccaaaagacttgtggcactcatcgcaaggatggttgtgcctccattcagggttgtgcagcttttggtgctccttgcagttggagcgtcgcgtgaattttgcgccacaaattggacattccaggccactggcagatactagcctgtcatttgacgcgcagcgctctattgtactcgggtccgtgacaccatcggagaatccttcgatagatgcttggggttgcaagacttgaccagtgttgattccagatccatcgtatccaatctcctctcccatcgccccaaggtaggacatgtcgttgacggataataggggcatcggagagggcatacacacgtccgaatacacactctggtcccattgtcctgcgccgttcggtacagtgaccacatccgatggcgttgtcggtcccgagcaaggtgtgtgcatccacatatcggtcatttggcccgcgaagacattctggccagaggcaatctccatgccagagttgtagctgggagacgcgctcatcgtcgtggggctgtagaaccccagtgaagtctctgaagcactgttgacgagtccatcgtaaactgatggatagcatgctccggcaaagtcgtcataggataatgcgaaggtgggatttggcgctccaggaatcagttgcgatggcagtgtcgacgtagggaaggccctcagttgaccgaatccattgtcgatgtcgcagcgggaaattcccagaccaataggggaaacacctccctgggacgaggtcgaaacaggagacgagtatattgaggatgcttcgcaagactgtatctcctctcttcgcggggatgtaattgaggtgcgctgaactaaattccgattcatggtgtagagagaagccgagataaaaaaaagaagaagtgtattcccatcaaataaccaaccggagggctagtctatatcagagtaaataaagggtgatcaatgcaagtatatatagtaaaggctctggagtcaacagcttcgctgttggtgattgacagtggtggcatacatcggtggctgagaggagggtggtggatagggtgtgaattcattggagaagaacttgcgccgcatcgacaccgacaaatgctgaagattcaacgacctgacaccgtaatagacaaggcagatttggagaagaaagggtctgtaattgcggtggaagagaaaatcgggtgggggcattaacggccgggggggtaagggtaatccggacgagatggcagtccaggtctggcatatgtgcactcacagagggctagctccggagagatcaagatagactatgtcatagccacctagggcaaatcaatgcatttgcagcctagtttcggccaattttagagatcgtaataccctgtaagaactactaaggtacataagagatatgacggtgcataacggcggctcttgggtttgtctgggaaaggctaaccatccatttgaccaccgttgggctggtctgcccaaccgagacgtgtcccatgcagggagtagccatacagaaacagcaccagagcccgagtctctggttcggcttggcgaggtgcattggtcgaggggcctgtcgaccaagagcacagccctgagacggtggggaatgtagtattttctgacgaagtccggaatcgggtgatggagttgatcaacaattcatgagcagaactaattatcgtgacctccgtcgtatgcgggccagcccttccgaaccgctcgatccctttggcttcatgtataccatagcgcggaaactccacattgactccaccggtaattgacgcgcccccggacaaactgtagctctctatgagatatccgaattcaacatcatggccgtgatctatttactcgcttcccccctcttgtggatcaaatatgagattgattgaaaaaggaggaccaatcttgaaacgccagggacagggggggggaagccaccccccaaaaaaaggaaaaaggaaaataggagaaaaaaaaaagcgaacgccgaaaaaaaagcaccaagcctgtttcgattaggccgtcatcgatgtggttgttcacaatatcgaacggcttttttggagttgtcaaggtggctctgccactaaaccgaacggacgccgactagcgctcagtccggcgcaggggcgtgcgtggctctaagcgctagggcagtgacccctctacgcgcctttcttttcgaacccgactccacagagccaaatcacagtgcggagccgtattctgtgcccagaaaattgtgtaatggtcacttttgctgggcaatagcctccacttgagttcgtagtcgctctatcgtgtcgatcaggtccgcaagctgcggtacttggccgacctgccccatctctagctcgcgcacggcttgttgatccacactaggtgcttttccagggcctaggcgatttgtttcaactacggaggggtggtgtgggtcccggcaccttgattcagttggttcagaagttccttgaccgcgtgctgacattgggggtagttggatagtggttcgttttaaatgtcgccatttagactcgtacgcccatatcaacgcgacaaacgggaggtgagtggctcggagcaggacaatgcgtacgcgacgaaccgttccggcagagagaaaaagccgcatggggcggatacagaggaggggaataagattctgccgagtattagcttggaaatattccagaagatacaaagaaagattcaagtttcaacgatcagacgctaactgaccaggggtggcatgaagtatgtcagtcgccgagagttgctgctttctagcacataaatggccaacctgattggcttgtcagtcaaatggaattttccatggggcagtgccaaatttcggaccagcagggatgtttgtatacttactgaaaaagatattcttctcgagcatggcgcatcacctatcacaaaaaaagaaattaatcagccacacaatatacctagtagaccgttttcccttaccccttcgaggctcatgctcatcaaactaatcaaagatgaaagaatgagggtattggtcatcaaggcgaaagtaagcctagaagtcattcctgtcagtatctgcattacattggcaactgcgtggaagttgtagattgccgtgtgctcaaagcgccccaaaaagattcggtcacttgcatatcggaacgtgatcaaaagcacatgcgacttttttcaacgtggcgcaataaaagccaaaaaaaacaagggaacctacatcaagccatagccgaagatgggggagatctaaaaaaaatgttagcgtgcatttcaacttaacacgacagccaaccatttcgccaatattccggaataatgcggtttgagctgcagaacagccgcctggtgcgcagacttacttcagacgcggtgtcctgtcatccaataaattcagccactgtcagtgcacatcctaaagagggaaaggaacgtgggaacccactaatccaagaacactcgatctgcctcaagtggtcagccaaaaattaaaagagcggtcacgacaggggttccttcaccgtacccaaagaacactttcactaacaaatgtgacattgtactgagagacaagcggtcacgggcaagcattgtgaatgtggtcaagaaacctgtaggggattcagcattttattcggctccgacatgcttcactttgtagggcggaatgctttgccacacttaccaatatacagtactaccaccacggggaaaaacctgaagaatgcttttgtctgaaacagattgtcaatcagccttgggtcgcaaagcctgagcgaggggttgggggaaaatcgcaccatctctttcaacaccggtatctattcatatcagtcaatcctgttctaaaatagtgatgcttcatgcaggatccacttactagactgccgaagtatgaattcaagctcacaagcgaacagatcctgctcattccgtgtcagccctgtcgcacaaatgcatagtccatgagtagccatgccttggtacaagaaacagagcctccaaggaaagaatgtcgaatgagagctcaatgatgtcgttgtcgcccttggttagcccgataacccctgtggcgttctcatcagtcgcaccatcaacacagatgacctgccaacgagccgtaaggcagattgggcactcgatgactcacttgttacgacaaatgcgatcccaacaccaattatgctcacgttccagaggctccagaagtccatttggtagaaaatgactccggcatcaatgatcccactcaattcgtcatacgcaaaagcgacgatccacacatacatcactgcctcgaagacgccaacggcatcttgtcgcctctctatcagtactgcgtagtagagaaagaggaaagacatgaagaatgctgcttcaaagattttccgatacagagggactctcaggcgtgaatacggatcagccgttctgatgaaagaatagtcagtatctccgcgagactatcccgtgtcgcgtctaaccttgcgttgaaaatatgaggtttcttggttgaattgaccgtcagagaaccccagaaaacgatttcacccttccaaataccatcgaccactttttgaacaactttttggctcagaaatgtctttgcattggcaatcgtcgcaatctcaagtgcattcaatccaaaaaaccgggaatatctctgggcggcataggtttcctcttggtatgtatcttgtgaagctccagataaccgagtctctgtgaccctcctgctgctaaaaaggcgataaaaagaagaggactttggcaagagaggagtggtctcactttcctcttgtctaccttggatagatgccagggcagggctacctgcttcggaaccaagggtatttgtcgaaccgcgccgcggtattggtagctcttccagcagaaactcaattgtctcgcgctggttcaggtgacacaggaattgccaggcaacaaattcgcaggctgcaccacggctctcattaagtccccagtcatcctcggtggcggtggtgaagtcccatttcaaaatcctggatctgttaatcaaccaatccagttctagcgtcgtctttgtgctgaacttacatcaatgccacaatgatataagggttgtgagtatcatctgccaaagcatggaccagttgtctaagacggtgtccttgggctccgtacagcatttgctcaaacgtgtaggccatatcacccacggccatgctgatgaagctacagggggcttggttaatccagctcgatcaagatcacagacaaggcttacttgaacagtttaggaagaacatcgaatagcggctcatcaatttcgatcaccggaatttccgtatgatccatggttttatccatctggagattgactccagggtttcctttcaataaaattggctgtttgcttttgttctccttttttttggacctagtgtatctccccttagggataaggcagaactgcaggtatcaagaccgaggtattgatggaagatccatgttttttgatcagcggggggttcaattgaccacaaataacaccgtagcaatgagctctgtcagtttaagataaataatcggcaattttaatatgaaacacaaaaattgttagaggaaaagctgacgagttgcaagttgccaacaacatcttgctgaccgccttgtgcacgtgtcgacacgtccagtgacttcatcggcttcagttcgactttccttatcgcatagttctccccaatcatctccatcggatttaatcattctctgactctgaataattgccatcaaatctccaacgggagatgatgggcagtcgacaccatgggacaaggctactccctcacaaccctgtccgcgggttcggcggggatcgatgtgcctgaattatctgacatggtgtatgagaagtcgatgggaggtggcaggtttatgaaaagcattcgcgcaaggcaaccaaatggtctggtgttcatcaagattatcatgaaaccgttcccaaccatggaactggagccatatatcaaaaacattgcaagtatgtttagatccctttttactatttcaagcttctaatgtccatctcaggagaacgaaagttattggcggatgtgccaaatgcgctgagctatcagaggattgttgagactgccacgagtggataccttgtgcgccagtacattcacagctctctctacgatcgaatgaggtaggtctgttgagggtgttactagcgaaagacgcctaacattgatatatagcacacgcccttttctagagcatattgagaaaaagtggattgcctttcagctattgtgtgctcttcgagattgccattcactggatgtctaccatggtgatatcaagactgaaaatgttttagtcacatcttggaactggctatatctttctgatttctcgtcgtctttcaaacccacattcctcccggaggataatccagcagatttctctttcttcttcgacatctccgggaggcgaacctgttacttagcccccgagaggttctctgttgccggggaagagcccagtgaaagcggcgtgaactgggcaatggatattttcagtgctggctgtgtcattgcggagctttttcttgaatcgccgatcttcaacttgagtcaaatgtacaagtatcgcaaaggggaatacagcccagaacacagtcaactagcaaaaatcgatgatccggacattcgagagttgatactgcatatgatccagcttgagccagagtctcggtactcggcggatgaatatctgaatttctggaagggcaaggctttcccggaatacttctacagttttctccaccaatacatgtccctcatgaccgatccttcttcagggcggacagatgtggatgcagaatcagccaaccgaagggaggcagacgagcgcattgagcgaatttacctagacttcgataaagtatcttacttcctcggttctaacacccgtggtgttggtgctttatctagtgtcccagtcactaaattgacaggcaacacccttcctgtgaggcttgatccgccaaagggtgaaagccaactttccgcaccgcagtcacagcccgacgagggtgctctgattttcctaacacttgtggtatccaacttgcgaaatacagcgaaggcatcggctcggatcaaggcctgcgatattcttcttgcatttgcagaaaggctgtccgatgaagctaaattggatcgcattcttccatatatcatggtattactaagtgatcgaaccgatactgtcaaggtcgctgcgatccgcaccttgacccaattactgaaaatggtccaggtggtttctccagtaaatgcctatctgttctccgaatacatatttccacggctccagccgttcgttgctacctccaacagcaagtcaagtgccatggtgcgtgcggcatatgcctcatgcattgcgtctttggcccagtcatccttgaggtttttggacatgatccaagcattgcgttcagatactcgtttggctgcgttgattccggtcggctttgagccccgatggactgaagatgcgacttatcacaatctctatgacgtggcacgggtcgatcttctagaatacttcgaggttcacacaaaaatgctgttgacagacacggatgcatcagttcggcgagcgtttttggggtctgtttctagcctttgtgtttttttcggcaatctcagagcaaatgaggttgttcttagccatttgaatacctacctgaacgatccagactggatcttgaaatgcgcctttttcgaggcagtcatcggtgtggctgcctacgtggggagcctgaatttggagctatacatattgccgctgatggttcagtccatgaccgagcccgaggagtttgttgttgaaagggtaattcgatctctggcagccatggctgacttgggcttattccagcgatcaacaacatgggatctcctacacaccactgttggatttttggggcatccgaacgtctggattcgggaggcagcagtcaagtttgtggttaattccgccaaatttttatcaatagcggatattcattccatcctgacacccattatccggcctttcctcaagatcaaaatcgttgtgatttcggatacccaaatgctcgatgcactcaaacggccaatgtccagaagtgtgtacgaaacggccttgctctgggcttccaaatcagaaagaggtgttttctggaagtctccaagtcgcgatggcatgttcagcttgtctgagcctggatcattcagtccccgggtgggtcaacggaatccttcctttaacatggccgcccaatcaagaaatgacgaggacgagcaatggcttagtcggttgcgaaacgttgggatgggccctgaggatgaattcaagcttctcgcactcaaagactacatttggagggtctcattgcggcaatcgagagaaagtgatgtccattcaaccccacactcgaacgacattgtcagcttgacacaaaatggagtcaagccccagactgtgttctttgataaggaaattaaagatcagccgcgaccaagccactcagacgcgaacgacggcacctccgaggaaccaaggccgagaacaattgcggatgctttacttgacgcttctacaaccattgagcgaatgcccattgctcaacgcaggcacttgcggtcgaaaagccaactttcgaaagagacaagacgttcctcgcttgttcctatcttggacggaaatgatacttcctcattatcatcgtctccagtgatatcatcgcctggcggaggacttgcgtctcgtccattgtcccctccgaacattgataatgatcacatggtttccagtcgccgaccgagccctgggcaagacggctcgttgacaccaaccaacctagacactagaagtctatccgatcgtgtacataaaaagcctagcgcgatgagtttgttgagtcggaactctgccaaagcctacgcagaaaccggtacaagctccgcaaacgcctttggaaaggtagatgcaccgattcacagaggaggcacaccccaaccattgacaccattgcttccacccgagcaaaaactgacgcagaaatatcgtgcacaccattcgtatgggggcaacgaccctgcggtcctgcggctgctagacaacgtctttgaggaaaactacccgacggatctatttgatctagggccatatgtgaaagaacttgacacccggcaaccgattcacggcgccactgatcaagagccaagtaagatctggaaacccgaagggaatctagtcgcgacctttggcgagcacagtgcgccaatcaatcgtgttgtggtagcaccagatcactccttcttcgttactgcgtctgacgatagcacggtgaagatttgggacacaactcgtcttgaaagaaacttgactcctcgatcgcgtcagactcaccgtcatgcaacaggctcgcgcgtgaaggctttgacctttgttgagaatacctacacttttatcagtgcggctaccgatggcagcgttcatgccgttcgagtcgactatcaaaaagtcagtaagacagccgtccgatatggcaagcttcaaatcgttcgcgaatatcagctgcccatagccgaagacgggtcccccgaatacgcggtctgggtggagcacttccgtgacgaagggcagtcgaccttgattattgcgacgaacacttgtcgcattattgcgttggacatgaaaaccatgctcccgatctacacactagaaaatccagttcaccacggcacactgactacattctgttgcgaccgcagacatcactggcttctggtcggcacaacccatgggattctcgatctgtgggatctccgctttcgtgtgcgactgaaggcatggggtcttccaggctggggtgctatcaaccggatccaactacaccccgtcaaggctcgcggacgctgggtctgcgtatccagcagcggcagccacggcaatgaaatcacagtgtgggatatcgagaagttccgctgtcgcgaggtttaccaagccaccccactgggcgtcggcaataatggccccaatggcgctcatcatcctccccgcgccgctcatgtctacccgacggctgtcgtgccgagcgattacgaagcgtggcgggtggatggcgaccggccagaagggatgctgagtcgctttgcaagcactgaaccaggtaccccatcctcgaataatatagccggcgatcgacttggcatcttggcgtttgcggtcggcctcaatgcccctgtcgacgacaaggacaccaacacgaaatgtggatacatcatctccgcaggatgcgaccggaagatccgattctgggatctagctcgaccggatctgtcctccataatcagtgggctagacgctgtctcagatggtaatgccagtggcaagccatactatgagcagtcccagcccggccctagtctcctggttaccaccgagcaccttcccacttcgccgagcactggcagttctcgagatgctaggaagggagccagtccgaggccgccacgcagtaccgttatcagcctgcagcagcaaatgttgctgaagagccatctggatattattcaagatgtgacggtcttgcgtgtgccgtatggtatggttgtgagcgttgaccgggctggtatggtgtatatattttcttagaccttatgttatatgcttccgatgtacgatatggaattgaacagtatctggaattagactccatatatggcatatgctcaattgtattttaggcatgattccgtacatccggcgtctttttatagacatctttcgcgaaagacataggaaatagatagcgaaatatatattaatggctgctactccgcacttcgacccctatcacggataataacgaaatagttaagcccgtgaaggtagctggcccacaggatctatattgtgtaatatcctcatcaagatgtagaacttccatttatgtcccaagctccattttcaagattaagccctcttgccaccggatacctggtacctgggcagggcgtaccggatacttcggcccacgcgggttgcagctgcatgaactaaggtaccgggtacgatgcctattggtactcaaattttgctggggagagctgtgctgtgggtcgttgcgaaacatgaaaacgctggtggagtgggttgtggatcgacaggcaggagaccctaataaggcttagagtaaggagagaggggattctggaaaggctgcggatgggattccaggagatttattattgcacggtgtgaaaggactagggaataagcgctattaattaagcttgcatgagggcggtttatcaattggttctgtttataaattttcaatgtgcgcagtaaactgtagtactacagagtagagagacacgccatcggctaacaaactacaattagaatgctgataaatacaggcataataacctcggacgaataagccgggcgagataaaataggactgcaaatttaccagaagcttggaacaaagagcttgctctataatctcggacaaaagcactccccgagtttatgactatttatacactgggtaatgtaaaacatactatagagtactcctactcgatacagaataagggtgttcgccagtgaccctcatccaatggtccatgcggtcttcccatatgcgatctcgagttctcgccagatcgctaccgttaccacgtacatacatgtacggactactgctccgtacggggccgttccttaccacatggatccagaaccctgcaaacttcaaagtcgtgcgtgaggggctcatccgggaaatgagatctccgctggaactgccagactaagcagctcggtaggcttagtagcttagctttcccgctttcacgggttagcacgagtcagtagagttttggtgaggggaaacgagaaaatgggaaagggagatgtgatgggagatgtacctggatatctggatatatattgtaggttgtgtctgtttcttgtttcctcaagggccaatgttagataatcaacattagaatcattcagggggtgttcccaaccaaggaagatcgaggagatggagacgggagtggagatgggccaggggaactggccaatcatggagattgttcacagctcagacgggtagcttgtcgggatatccatggctcacgatcttgaattcggcctctgatgaaatcggatgaacgcagatgatcgacagaggagggattgaaggaagtggtgaagtggttggagtctcctagctgctcgcaggaactttgcatatatatggttgcactgcatgcgtagataatgcttcacctactcttttcgatgtcctgataggagtgagcatcaatggttccagagggtggacttgggtaggtgttcacctccgaacggccagaatctcatggcccaagataacagtgagattccagtcagaactcttatacggtgggaaggataggtgcatatacttgataactccgagtatcaaagtttgaggtgaaacgaatagatcacaaagataaaacccaacgttaccaacggtgttggatgtatcatttccatctctttgatctaataatatgattatctcgctgacgaaaagaaacgaaaaagaaaagatgaaacacagaaatacacaccctgtaatccaaataccgtacggaattaaagtggagagaaccactttcgtcctagtctataactccctcgattcttcttctcctatttgtccctccccctaaaccctcttctttcttgggttctgtctttcaactgcataagttgtatccatatggcgggtgtgttctcgagtcttgagtattattgaagtttcacccgggcttctcacactctctaaaacatctccccaactttccttggtcttgggtaaaccctcatttcgaactgcactccagcagtgcttcccccccaattcatacagtcctatatctcaaggaatcccaaccccggactctacaactcgacatactcttcgactcgacatactcacccgatacataaatctaccacaatggttcattctctgcgagatcatggatctttggtccggccatccactcgggatcggcccgttacacgcggcgaaggggaaaattcgctggtcgttcctagccgcacatcatcgttgcactcgcgcatcacccaacctatcccgtcctcacttagtatcaagcccgcccagcggacaccgaaaacactcacccatgcgtacatggtatgtggtgtcgggcgcgaaccctcacaatgggtcaaagcgcctgtccccgaccagggcaagattggccacatgaagggagccgtcggtcaattctggctgccggagattctgggaagcagccctcggttagagcaggacaatgagatcgcacgagccctacacgcggccatgcgagcatgcttccctcacgacgtggagatctgcaccggcaagagccagcctcactgtgcacaccacgccttcgtattgcaacaagactcttctcacactctgtacggtattgcgctgcgcgtttggtcccgtgccgacgagaaacgcgcggagactatccgcgagctacgcaagaagacggagccggacttctatgataaccccgatgagacctactggattccttactgcttgagcttcctctcccggtatcccctctacgatctgctaggtgactatctccgtggcatgtggatccactggaacaaggccaccaatctgttccacgccgaggaggtctcccgcatcctcagcttccccgcgccacgtctcaatgatttggtccgcattgatatgaaggactatgccctctgctatcagttcccctcgtcgcccaccggcttccaaaactttgccatgtggccattgttcacttgtctgtcgatccctaacattgtcggcgtgattgaggctgcggtctcgcctacccgccgcatcatctttgtcagccactacgcggccatgctgacggtcgctgcggaaaccattcgctactgcgttcgcgtctatgagtggagtggtctgtacgtgcccgtggttcacgcccgccatgtcaaggagctggtccaggagcccggtccctacattttgggtatcactgccgagtgccggactctattcaacgccccgtctgatgccctcgtggtcgacctcgatcgcaactttgtcctcacctccagcccgcctagtgtgctgaaccagggccaacgcaccaagtttatcaaccgcatgacccaatccctgaatggtgatgtctcgccttccggtgtgccccctcacctgcgcactgcctacgctggcggcaagctcattccggctggccagatcatcgtcatgagaggagaggtcgaaagcattgaagaccctcaatggtggaaccaggatgctgtcatgggcgttatggaccatgtatgcgagaagctggtacgttcaatcatctctcaattgtcactaaccacaatcaaactaacagctatttattagggccgcaacaccggcatgaaggctatctttggtggctccgtcaagaagcccctcatgaccaaggtttccatgcgtcacctcaacgagattgtccgtgagcgcaaccagtactctcgggatgccatggaagcttggcaagacttcatcaacctcaagggcagaatggacaccgaactcagcaaggtcactaagcgcaacaacttcttggtcgaggagctcgagacctggaagcagcagttcctcaagttccaggcctttgctgagcagctcaccaaggagacctctgagctcaaggtcaagatcgaaacccacaagcgcgagagccgtcgcctcactgctcttattgatcaacagagggacgatgtggttcgccttactctgcgcttgtccggtactgagaagcagcgggacgatgctctagaggcactggtccttcagcaggagattgccgaagagctcgagcgcgagcgcaagcgcaaccagaaggaaatctctgccctctcgcacgccaattcgactctcacccgcgaacgcgaagatgcccagcgcgttgtcatccacctgcgcagccttatcaatggtcagagccaccacatggagcacatcgtccgctccattagtagcaggtcggagatcgctgaaatagtcgaattaggctacgaggacgcccccgaggagatcaaggataatgtgtcagtcgctgagtcgaagcattccgtcaagtcgactaaggaggtcaatggtcgcagtactccggtaaatgatatgaagcccgagctagagcagcatttgctgaacatcggcaaggaacacaagagccttgcacgtctcagcatcacagatgttgcagaccgctacctgcgcgataagaccgatgccatcgcagatatcatccgcagcatcagcgaccagtgtgccgctgccgtcgaaggcctgcacctggcccaggacgccgaggacgagcaagaagccgagacctcttccaatctccaccagaacgaccgtcgtggctccgaatatgacaacatggagagccggtccatccgcgcccctagcgagatcagcgataccgacaacagctatctccacccggacaaccgccactccagcatccccccgaccccggatctggtccacaaccgctccagcacgtctatgtccatgatcagcaactcgactttccccgagcggtcaagcgggcagtatggccccagcgatttcccgacccggatcgttgaggatgatgatgagcacgctcacgagactgagaacgttgacgaccagctgactgagcgcggcactctgtccaagcagaatagcgaggatctcatgcggcccactgccacacgggtgatttaaattttcgaccagcttttcaggttagatgactgagacgatcttgttttgtttttcccttctcttctctgtcaattccttgttgtccttctgtctggcgaggccttccacccggtttcttttacttcatctctgctgtatcctgaatacgcacatacgctttggttgtctggcgtatatcccatttctcgtcgtgtcgatttcttcattatatccactcgatcatctatgtgtttttcttgtccaataatttatggtcatttttgccttcctgggacttcttattttttttcctctctttgttttttttttttctttttaccccgttcttcccgaggattgtttattcaccatatgtcgtgccgtctgggatggaacggcttgatttgtttgatttgccctcatctccagagagccctccactttgcaccaccatccgcattgcctgcggatgatatttccttttcatctacaatccttgatctggattgatccgatctaccagggtctatatagctccctgtcctccaaaatggattctgtgaatttaacttttcgaaattgcctcattttacatccattgtagccaagccactccaagaaggcttatagaaccacccgtaggattcatatgttaatcatgaaactatatacatcactcaaatgcagacccaatgccaaaacccatttcaagccaacttccctggcacaaaaggatgaccagcactcaacccgccacagaccgcccaagcctgcccattaacataactactctcatcactaccaaggaacagcgccacacgcgcaacctcatcagcaacagcaccccgctgcaacgggttcaactgcccgaccttgcgctccgtgccgcgctcccgcgcccggtcaaacactgtctgcgtcatcccagtctcaatcagcccgggacagatcgcatttatgcgaatacccgttccagagagctgatacgagaccgtctgcgcgatcgacacgacagcagctttcgaagcggagtagtcagttgaaccggcgtttgagcgcagacctgctacagacgctgtgccgatgatcgagccgcctgggtacggcttcgaggctgatgttatcttcattgccggggcggcgtgtttggctgctaggaagacactgtttgtcgcggttagattagattcgtattcgtttgcgtcggggagaatcccgtttgctacccttgtgtatcagggaagagaagagaaggatgtgtatgtaaatgtacgtacccgagggcgtttactcgcatcgtgtttaggaatcccgcactgtcgatctcggtgaacagcttcggttggcctattacgccggcattcgcgaagaagatgtctagtcggccgtatttgctgactgcttcgtcgatgactgctttcacggctttttcgtctgctgcgtcgaaggtccgcacgtgcacttctacttttgggtacagggtctccatctcccgcttgtgcgttgctaggtgcgtgtcgctgaagtcgcagatgtagactgctttggcgccgttgttggcgaattggtgggcgctggcgcggccgatgccattgggagagtttgcgcctggtttttattggtatgcttcttgaatggccttgggaatcaatgtgtgttacttaccggtcacgattactaccttgtccttgacgcgactgtagatttgattagctatgtttgatcttgtaatacatacaatgcgagaagccgactgaggaataatagagctataagctttaaggatacttacggtcctgctgaatcagaggcaacatgacggatcttgggaatatcctcaaacgtgccctcgaagggaatgccttcaacgagctgcttgctcagggcttgaagacgttgctttgctgtatcagacatatttattgaacttggggaatcttagaaggctgataataagaaaaatgacttgaacgtgctacaaggtccgcttcaattgcggtaccctcgtagttataacagcttagcagctttccccactatgtcggttatgcggagagccgaggctccagcagtacagcagtgcatagcgaccaatatggtaacacgatcacgtgtaaatggatataagcattgaatcacatgacactcgtcaggtcacgtcatgtgccgtagggtatcaaagctgtctttgtgggtttccaaacaacgcaaatttgtgctctttgtttcctcatgcttttgttgttctaaaatagggtatctagggttgaaatgcatacctgcccctgaacatccggtcgatctcccttcattccatccgcggatcactacagcaaggatcgccaagcacgcacggcaagaccagccaagtatcaaaagctacataagctacttgattatttgtcttgttagcccgggcaccgtttgcaattcaatgcaattcacccatctccgaaagctctaagagaagccttcatgaagccattaatccacgattttaccgttcacgccattgcccggttgttgagtcatggcggattccgacacccactcccagcggcgttcatcgtcccaagcctcaagcgcctcgagcagaagtagaaatgctaagatagctcgggctaaaatgcaaaagcgccactcgggctcctcccacacaacgaccgacttgacctcgttcccctcgctctcaccaccagacaaatctccaatcctcgcccgcggcctttcgaatgcgttgttcgccgacgaaaacagagcggaatcaactggaggcgtgactaaccgtgggcggaaggctacgctagaaaatctgacgaccgggctcaaatcaggccgatctgccctcttcgccgattccgtctcgacacacgatatcccaggcgcgctgcatttggctgatgatgcgcacattgagcggctggttgccggaacaggcgccgtgaagatggtgaggcagttcgctcgcgatctggctcaacgggatgctgagatctcggccctccgccaacgcgccgatgcgagggagcgagagttgaagagaatgctccgagatgtgtctgtgtccaaccaagatattgaacgccgtctctatcagttggagaatccgccgggtgatcgtgtctcagacgcagaaagtactcatagcagtgatcatgctggtcaagcctattccagcttgaatggactgatgtctcaagctatggaagacaccgttggctctcggcctcatggtgactccgcagaagcccaggccacgattcgcgcccagcgatcagacaatgatcgaggtagcggagtcactgacagcggcaagcgtcaaagctcgattcggggctggcaggagtacctttttggctcgaccaatacgagccggaaaaccagtcgcgccagtagcgttatgagtgatgtcggtgaagttggagaagaagagactgagcgtcttcgggtgcccagcaatcctgcaatgcgacgcaaagcgcttgatgagcagctatttcaacctccagatggcccggcacgaaacggaccggcgaagcgcattgctagcacgtctgtaaatggcgacgatgtaagcattcattcgcgcaaatcttcacgttctctcggctcttggactgttaagttatttgctggcaatacccagtcgagcaaagatgcaagtgatactgagtctatccacaataaacctcaactcagaaggcctgacggagacaaaagtacttcgtctacattttctgccaattctaagggctcaatgtcggcagtggccgcactgaagaggattaacagcaatgtcagtatcgctaatactggacgatctgccagtgggtcgagcgtccagggcaaaatgaacactcctgccttgcgacgcaatgcagctggcagcgtgtctcagggcgcgacgtcggagactacggatagagcctccacaaatcttggacccgtcgagatggacgccattctgcccatggagtcgaagcctccgacgctgacacctatttacaacaattcccaatcgggtgagtttctcaccgaccggttcggtttcatctatgatcaacataggaagaagcgccagagagaagcgaatactatcaagagcggtaatcgcagtttgagtataaccgagactctcggtcatcttcgaactgatgcgtcagatcatgaggatgatcccgagatcaccaaacttcggcaggacgcttccgagacctcacgttctctacctgattcaccagatgaccctgaaagtggaggtattgccatccgtcgctggcaggactatctgaagatgccctcccgtcccacagagctattgtccgacacgccctgcgcaggcccgattgtctccttgaccactgcaggagagagtcgctctcatagctcgtctgtttcctacgacaaagacggggcgttggccgtcgggtctagcgcacagccatcggcgtctacatcggctatcacggccgacagccccgaattcgctggcttgtcatcggatcagctcaaagacacagccgccagatttactgtcgcagagatggaacctgtaaaactgttgttggaacagttgactgatctccacgatacactgcaacgtgatcgaaccgtgagatggaacgagttccttcgcaaagtgcgcgctgaacgccgaaaagagggcgaagcggcagccgctgccgccacttccgatcgatctcttgctgccgttgacacgccagaagtctcgctcgccgacggcgaagttgtaggcatcgcaaatctgggtaacaaaggcaaggttggccgagcgaagtggcgagaattccggctgctcgtactcggcggcatcccagttgctcttcgcgccaaaatttggtcggagtgcagcggggcttcggcaatgcgaattcctggctactatgatgaccttgtgcatggcgttggcggttcggaccccgacccctccgtcgtcgcacaaatcgacatggatatacgccgcactcttaccgataatgtcttcttccgcaaagggcctggtgtcggcaagttgaaagaggttctgcttgcatactcgcgccgtaacccagaagtaggctactgtcagggcatgaacctaatcgcagggtctttgctgctcatcatgccgactgccgaggacgcgttttggattctaacctcgatgattgagatcattttgccccaccactactacgaccatggcttgcttgcctcccgtgccgatcaggtagtcttgcgtcagtatatctcagaactacttcccagactctccgcccacttggaggaactgggcattgaactagaggcactcaccttccaatggttcctatctgtcttcacagactgtctctccgcggaggcactgtatcgcgtatgggacgtggttctgtgtctcaatgtgaccagcacaataaacggctccgggccaaatgcctctggtactaaggagagcaacgacaagagtgccaagaacgccgaaaatggtgcctctggcagcggaggtggaagcacattccttttccaagttgctcttgcactgctcaagctcaacgagccacagttgttaacaacctgctcgacgccggcggcactctacacatacatcaaccaccaaatgacaaaccacgcgatcagtatcgacggcctgattcaagccagcgaagcactgcgcaatgtcgtccgccgcgaagatgtcgttgcacgtcgtgctgttgccctgcaagaaatgcgcgaattaagcagcggcgcaagcacctagacacttgcctgatggaatttctcgtcatggcctttcattcatttccccctgcattttcgcgtaacgccgataccacctgagcataaggcaaggagttttggcttttctgtccttttttttttctcattacctggcgctattcccctcattattcctcggttttgtgaaagcacttgttgacatagcccgcgatgttcttgttgcctgtctcatataccatcaacccagcatttgagatacccctggattttacacttgggcggcagcacttttagacctgtttgaatgaaatcgaagtctttttcaatcggcattattcttgtgcattatgaatctttctgcaactctgaagtgtctaacgtggcttactctagggctgtcgatttatcttacaagttccgatcctaagcagaatcgaaatcatacaagggacaagcttattgcttcgtatcaaacgacaaatgctaatttacttgctatgttttgaatcattttttccattttcgctaagaaactaacctccatgcgaaaacagccgatactgcagttaaacgacaaacccaagcaccacgaagggaagcattgaccaaatctttccaactaatccaaccgaaaatcatcaaggttctgctcaaatggccactcagtcagcccgtctcaggtctgggcttcctcgtagtcccctcgaagtcagtcaatgccggttcatcggccctctccatataccgaaggacctccaactggtgaagcttgtattcaaatgtctgtgcatcggatacacttctgcagagctctccgtcggtgctgatcggagctgtgattggatacggtgctgttgtcatgaacctggccttcaactgcggcttgaaggtctctctggctacttttattctccgaccgtcttccgcgccgctgtaggcgtcgtatttgatgttggcttggtccatgagacctatgtactgatatcagtattgactatctagcgtttcagaaatctgacaaacgtacgctccatatgcttgatgtaaaggcacattctctgatatgtccgttgcagctcgcgcttcttggtggctgctctgacatcaatgtccagcatccaggcaatcattgcgcaagatagtcctatcaatatctgtcagcttattgtctttgagtgaacccaggtttcatgttaacctaccgtctttgctgtagccatattgttgttcaccctgatatggcgctggaaccttttccatgcgattcacgaaatccggaggcatattttcagcggccatttcaggcgaaaacactgaaagggttggaagatatggaacgaatgttgaagaagggagaattcgttccttttttctatcttgcttcactttctcttctgcggagagtcggagacggccttctctttgttcttccccggtctatctcaaccagtcagtctgacaggaataattttctttgtcgtcacatatttccaaggctctagaaagttaaatagctgggtgttgcggtgaaagccgaaattgggggaataaaacatcttgtagccacattctttgttctcgaaatagatcttgtatacttcaacatgtacgctttgttcaaaatcaaagcctgcttcctctgaaagataggctagaccagataattcaaggagtcaatgtctccatctggattctgttgtcgcactagcgtctatataacaccctttctctcaagtccatcccctttgataacacacatctctctctcgtgtctttgatctatcatctcggcaaaatgaattacgagcgcatgtcagccgaaatccctactctctaccggctatccagggagtccagaggtacatagtcatatctccctatttatttcccttgaaccctccagcccacgagaactaacaactaacaaatcatcagaagcggaccttctcaacggtcttctgggctggatccgcaacgaggcctttggaaaaatagcagaagcctgtgctctctggggtgcaatcgtccaagccaataagcaccttgccaaagtcgatcgtgagacatgtcatgcgctctaccttgttgatcgtcgttgctgattaggttactaatctaggtacgctgcacgctcgtaatattgaacatgagcactttaatctcaaagaagttctgaattccgagttgaagcaggctaaggaaatgatggatgccattccgggtggtagacgtgcaactacggtcactaccgaggaagatttctcgcttgctattaagcggttgaagtttctccgtgaatacaagtagtctgcttggtttctggactcgaaggaggatgtaatttctggcattgatatctcctatgtactctatatttcaatgaataaggctgttgttcaataatataaggtcaggtaccggtggaaacccatttccctcccggtaccagtcaagaagcgggcaggaatcggatacagatttataccattatgttgtatactccgaacttgggtctatagccctaaggagggccagaggagggccagagtcctgcaaggggttggtggaggcggtgaacacaccagccctttgatgaaaggtcaaaggctggtgagcacgctgggcccgggcacgcttttgacttggttcaacaagtgtcgaagtcgcgaatatcagggacggtgtgaaaggtcgaatcggaaagaacagaggtagtcatatcttctttcctcagctcgggctctgatccacccagaactgactgttatctaacaccgtggtcagatccagcgagtccatcgtcggacgcagtcccaaatccatgacatcccgtgcaacggctttgatctgccgcatgatcgactgggaaatggcccaggtgcgagccaatgacttgaagacaccgatcgtcaacgccaggcggtcgcggctggggtctggcatttgaccggctttgacagagcaggtggccagttggacaatggagctcagagtaagcgcacaaataaagaatggggtgtgcttgacaacgggcagacggaaggccgcaaggcgggacaactctcgggcggccttcgcggccttcatggcgtgctcgttgtgcgagaacgcagggacattgaccgggccatggtggccacagattacttccgcggcaacggcgggagatgaaagaagatcagagcgcgggaagttgaggtagatggctgcgccgtttaacatcatggttgcctggaacatgatctcatccacgcttccatcgggtcgcaagagctctagcttggactctggcaagtgatggctccaactaccaatacgggcatcaagggcttctacatggtcctgctggccttcggtcatatcctgcatcgccaccacgcgaccgagaatccgtatggcttcaatacgataacagtatgaagagaagtcacgttcttcttccgcgaacacgcgcgcgtcaaactgtgcaatagtcggagacggtggcggtggtagggcgtcatggtagatccgctcctcgcatggaagtgggacctcgagcggtacttggttggtccggtactcgcgctgcacgccaagggcagtcatgagaccctcgattacgaagagctcccaccaggtgcgccgcagagactcggcgcggattggatccccattgcttacaacgatggcaaacgtcgcttgatgcatgccaatctcaaaggctgtatctactgcggcggctagacaaacgccggcctcggcgcgctcattatctgagtgaagcacaatcgccagcagaagcagcgcctgcaccttttccaccgacgcattttgttcttgaaccattgcgacaaccatatgccggtacgtgtcactcgaggcggccggggtgaagtgtgcaccaatgaacttcatcacctgctccaggtatacggggaacatggagcgatataggagccggtggggcggcaggattggatgagcggcgtggaaataattatagtagatatcgagcaggtagccatccccgccgacagcagaggaagaatccggtgtcagcggtccgctggttgggcgaacggatggaaccattggcgtcgagaaaccgtgcagtccaggactagtcgattcggaggagggtaacgataaggtcggcgcataagtgaagccagcctgcgaggcccaatctacggggccatcgagcatgcctaccgggttgggatccatgcgcaaataatccggcgagttagcgcggcgctttttcgacgggcccttatagcctctccgagactttgtatattcgcaatgggatcgggccagttcacatcgactgcagatgggagtcctgccatcgcatttgaggtgtttgtgacgacattgaagacaggccaataatgcgggacccggtttggacccagtaggggcctgcaattcggtcatcgtgaattaacgacgcatataggaaatgtctcaagcgaagtagaattgactggcaccgatggaatagaggggaagagaagagggggagattgaagaagttcgaatgttctcatgttcccggggagtggtaatttcgccatacgctagggggcaggccattctctctttcctaggaagagcttgtgtatattcctagagaggttctacaaggatattccctacagaggtagagaagtacctattgtaataaaaggacaaaagtactaaaaaatataagcgttttactatggaggaaatacattacaccgtaatgcgtatacctccttacattaccatagctctctttcacctacctccgaccttgtcaactacatactcccatctccctctacttgattctcctctcttcgtgtcttcttctcttccgttcaatcctttcaattcatcgaagagagaaaatcccaattcctgcttttgcgaccaccgcaatcacgcacactgtgtagcgtcacttgaactactagccgacgtggcttctccgattatatcgcccacctcttaacgctttgtcgcccgactctcgttctgtctgttgattccatctgcgtcctctgtaacctcctttcacaatgatctccgacaacgacctctaccgcctcgccatcttccttggctcctgcgccatgatgatgattgtcctataccacttcctcgatgtcaattccagtgaggaggaaccagagtctgccgaatcagcaagccagattaaggctaaggatactgtgccagtggtgtccacggacagggtgtcggcttcagagaaggggaattgaatccgatttacgactcgggagagaaccaagataccagtgcctacatcttttgattttacttttaccagcgggtcaggcacaagccaattgtacacgacagtccaatcaattggagagaaaggcagtctttgcaaatctcatggctttattcattacttccattcgagtaatttggaaatgcgtgggtccctatggaattcaccgtctagatttagataaaagcagaacctcttttaaggtgtcatctaggtgcaaatatttcaagccctgttatagcaaggtagcatattattatatgctttcaactttcaaagctaattcacatgcaagccagtcgctatgcgataaaccgagggaaaaaaaaggaaaacaaaggtatcacaaaggtatcacaaaagccgatcggatgcatcaatcattcgcaacaaatgccatctccccacagtgtacattattctgccgcgccggtgtcgacagacgacggtcactccagtccatatcaggcccaatctgctgtttccagtgtcggccagcttcgagtagggcttgcgccttggtcttaatcgtcgatttcccatggaccttgctaaaggcctcgactgcgatctgttccactggcaagatcatggtccctttgcgggcactccggtcacccataactgaagggtgattcgattgaatttccgctagagaatttatccgattagacattttcttcagaccaaaaacatcgtgtgtggatcagccccatggaggagcatcaagcgcaagcaagttgtgattctcaccagttactggtacttttggtccatctccaagcgcccaagccattttggaaatgtgctcgctcgacaaatgcctaaacatatcggctgcagccattggtgtcttattgtcacagtcttcccatttgcacacaagagagtgtgggatgtgaactttcacaatgtgagcccgaactgagtcaaggttgtgaagttctgcaatgcatccctcccacttgcatgggaatatttgataatgcacgggctgttcacgggggatggcaacttcaacattgttcgccacgctcctgggaggtcgtcctggtcttctcttcggtgccatcttgggtgatagagggataacaacttgtggctgcgaaagacaccttgcctctggggatttgacagtccgattagagtctgattggctcttgacagtctgcccttgaggtgtaggctgcgttatagattggggggtcgcttgttttctggccggcggggattttggtggagctgcactctttgtggtcgagggtggtcgctgttgtggtggtggttgcggttgcggttgcggtgacgggggggttgggaatgggacggatttgcgagacgagaaattcggcgacgcaggcacggggtcaattctcggaagtccagaagggaagttggaagaaaatttatgtgaagaataattcgtcggagcttggaaagacaaagtaccccaagggttgaaacctccagaagcgcgcgcgtcgatactttccggcgttgcgacttgacggtttggcggtgtgtcacgcgacggcagcgatgcgtggtcacgtgcaatcgcatgatttggtgtagcacgcggaagtaattgctgatctgcttgcagcgattgaggatgaggtggtcgaagaggtggcatttgtggtggttgaggatgaggaagtggtcgggaatgagtaggaagtggtcgggaatgagtgggaagtggtcgagaatcagtgggaagtggtcgggaatgagtgggaagtggtcgagaatcagtgggaagtggtcgggaatgagtgggaagtggtcgagaatcagtgggaagtggtcgggaatgagtgggaagtggtcgagaatcagtgggaagtggtcgggaatgagtgggaagtggtcgagaatcagtgggaagtggtcgggaatgagtgggaagtggtcgagaatcagtgggaagtggtcgggaatgagtgggaagtggtcgagaatcagtgggaagtggtcgggaatgagtgggaagtggtcgagaatcagtgggaagtggtcgggaatgagtgggaagtggtcgagaatcagtgggaagtggtcgggaatgagtgggaagtggtcgagaatcagtgggaagtggtcgggaatgagtgggaagtggtcgagaatcagtgggaagtggtcgggaatgagtgggaagtggtcgagaatcagtgggaagtggtcgggaatgagtgggaagtggtcgagaatcagtgggaagtggtcgggaatgagtgggaagtggtcgagaatcagtgggaagtggtcgggaatgagtgggaagtggtcgagaatcagtgggaagtggtcgggaatgagtgggaagtggtcgagaatcagtgggaagtggtcgccgagcttgtaccataggaacacgggcccctggtaccgagctacctgcagatgggtcgtttcggggaggcattgtttgacttccgccattgtccaaccgtcgcatcttcgcgggtggcatagaaccatgaaaatgatcttgggatggaacccaccgtttttgctgatggggcggtggtatcggcagtgggtgaccccgcgactgcgcattcccagcagtaggctgctgtgccacggccgagtcagaaattgttcctcgtcgaggacctgaagtatgcgaagagttgtgccccgtgtgagaggccacggggggagtgaatgacacagaggctgaggataccactggcgtgctctgtacgttttgtcgggagatcggaggcttctggtttgtctggtttgatgtctgtgtagggggcgctggaggggcaggggcaggggcagaggagacaaaagaaacagaaggactgcgagttgagacaggctggaatgttgcggggctgcgaaccctatcaggcgctattggtacggctgactgcacatggtcttgattgcgaaatgagggtaaaggcgaaattgggtttgacctcgcggaattagtagacggaccctcccgagtgctcatggctggtgtaatcgaatggcgggattcaactgtgctgcgtgccgctgagggtttcaatcccttcggcgagtccaaagcggtgtcaatctcagcacccatcgagtaggagcttcgcggcgcattctggtgaggtgatccttgagcattctgggggatcgtggaatggctttcatatgggctttcatatggactctgcgattctcggggccttgttaccggtacatgtgtcctttgagctgcagctgaaatatatacttgttgcgtgtcctgggcaggggtggtagagtagctctgatacggtcttttatgtgattgggaccgtgccacaggtgtatgtgtcctttgaactggagggatgtccgtagtggaataaggtgatcgctgagtattgtggggtggaattgtagagtgggtgtaagaaggactttgcgatgcggacgttctttgaacttgtgctgccattccttgtgtcatgtaccgctgcatcgagatctggaaattctgatttggggttgccgagtagccctgatacgggcttcgtgatgtggacacagcctgtgccatgggttagctcgttctctgtgtagaggctgtcgatcttatagtctcgcggaccctatgggtgctttgatgggcctctgaggagcttactctggagttagaagatctctgcgggggcccaacaggaatttgggcgcggcgatatgcatcttgacgtgccagagcatccgagtctttttgggacagagcggagggatttggccgttgagttatattgcgagagcgagctgtttggtattcagaggggccataaggagcattgttggattgaatattgctatttcgttggtgtttatttcctccatactgttcacccgaggcttgggagtacgcctgagacggattcgaggcatgattaggataggttgacctcattaacatatatgtcttctgtgcctgctggtgcataacggccgctttagccacctcctccgcatcgtgaaatgccggatgtgtttcatgagcctcaatgtcagaactggggtcgtggccggtttgagtatcggctggaagaaaatgctgaagccaatcatatccgtccatgcctccgtgaaccatttcaaattgtaccgaggctatatagcagctataagcgcatagctaagatgttgtaggaccgagcaaagagaaggcttgattagattccgttgcgcatggagggttggatcgtggccggacagggggaaagcgggtataacagatagactcaaaaatactagcaaacaaaaaatggcaaactgaagaatcaaggaaggaaacttcccacggtgctgcaaaagcgcggccaaagagctctggcgatgtcgagccacattgagaagcgcgtcggaggtggatcccgctatcagccaatcataccacgggcttttgtggccttagaggtcaggtgtctagtcgcaagccctgagatggcttagcgggaaattagtaagcacacaatcccggggctccaacttggaatattcggctacaccagaaaagatcctctcttcgacccaacgccaacgacacccgttcatttcccactcacgacctttaagatggctgtccgaacccacggtgcgtactctctcgcatctcgccttgcgccgatttgatttaccactgctcgaaacccctatcaatacgaattttcgccaatcttcaactttcaatactgatggtgtctccaggtatcgcctcttcgcggagcaagtctcgcaaggcacacttccaggccccctccagcgagcgccgtgtcatcctcagcgcccccgtctccaaggaactcaaggagaagtacggagtatgtaccacatgaacctccaaatcgaatctgggtctgttcgggtcgagtttttggaattggaaactacggacgatacaggcgccagaatggttcaatacgcgacgattctaaccagtgttctgtgatagatccgctccattcccatccgcaaggacgacgaagtcggtgagtttcattgatacaacctgggaataatctcgagatctcgaaactgactactatatgcagttgttgccagaggttcccagaagggacgtgagggaaagattaccaacgtctaccgtctcaagttctccatcttcgtcgagaaggtacgattcgaattcacatcacgcttattgcggatacttactgcggttttagatcgttcgcgacaagagcaacggccagagcgttcccattcccctccacccctccaaggttgtcatcaccaagctgcacctcgacaaggaccgtgagcagatcattgagcgcatcgccaagggtcgtgaggctgtcaagagcaagtcgacttaagggatttcttacgtgtggggtataggttcatgttgcaatggcggttgacggcgcgggttcacttgaaggactctgagaaacggagtttccagcctgctatgatcagggtaaagtttctgaaaccaggtgcattgcgatgaatgaaaaatgaacaaaaaatttcctttttcttctatccggagtcggtgctcgcaaggcaattcactttgcgcagccggcgttcttcttccttcgtctcccgcgcacataggaacctccgtcgaatgctacagctcaatcttcaggtcattacgttccttgtccagtttgcagctcgtccgttctagcatgcttttccttgctcgattttgtagagacctgtctccactcgcttccatctcttttcctctctattggaaaccagaggtgtcgcctgatatatctcctcgtcaatcccgtccttttaggacggatcccatggttgaagaggtaaacacttggcgtaaactattaacagggctactgggaagctggtagcctctgtctcacctgcagactcactctgatgccttcgggcaaggacgaagtgggtttgaaggtgaggtacatatcctactccaagttggggtatatgctgtaaactgtagggatcatatcttcggtgcgggggatattggatagtggatattttcaatcgatcagttgatttacttgtctcaatgttttctcttcaattttctaacatttgtcttcgttacttatcatttggtatctatgtacctatggataggaaccccgcatggatggtatgatgctggctgcatatcgtcaagagcggcagattgcagtggctatggaagagatcaacgagatttcgatgcgcccactgttaggagctttactgtctaaccatacgcactcaaagatggtcgtttctttctaaaactcggtgaaaaatttgcttatttgacttatggatacatatcggggggatccgatgtatatattgtcgccttgctcagtagaatcagtggcaaaatcccaactagacaaccaatcaatcagcctatgaaatctttataccttattgcataaacgttcacttctttagaaacaaacaagaaattcatcatttacaatagcccaagtcttgacaagaggagacatctgaaagttgagacataccagacctactggctagacataagtcaccactcaagtccttaaaaaatatatgcaaacttcaatatcataatgaatacaaatcagatagctgtaatatacaagctcgagtaagaaaataatccaagtagtaaaaacggagcaaactcagaaaagcagaaaagcagatgaccatcgcatcgtggtctcatgagaaagtcgaaacccgaagcaaccccagagactggatatttgaaaaaaaaagcacgctcgctgaaatattcgactagccaccctagagtgcgctagtgtccaacacacttcccccatgcaggtagtccacaccccataccaatgaacagatacagcaagaagataatgacgatcacaatcataatcatcaacttggtattcttccaccacatccgcctccgcagtccccggctacgaatccggaagtcatgcgcacttccgccaagccgatccgtcttgtcaaccagcagatcaatgcgctcgccgcgctccaggacccgctcgatattctcggtcataatatcgcggacgctatcgatttcgcgccgggcggacgcgagggagtctgctggcggggcggtgttgtaggattggaggagagagcgcagctcgttgttgaaggcagcgcagccgtaggcgggcagtgtagcgaagtcggttgtggacgggttgtaggtggttaagaacttgcgcttcatttctagcaggtaggcgaatgggatgcggcggccttgctctgccgatgcaactaccaggaagctcaggggagcgtgtgagttgggctccgcaatgttgccatcgccggattggttgccggttggcgagtcggcaatgtaatggacgaacagtcgttcatgggtgaaggtgagcttttgtggcttgtcgtgcgtgatctttgggaggatgattgaggctagtgacgaggcggcactcgttgaactacccggcgaggagtgctcggccagaatggtagtgcgataggcgatgcatgagctgaagttgattacattgttagtccgaaaatagtttctttgactgctcaaatgtcagacagcaagacttactagagcaaagagctcgtcttggaggatgaggccatagtgatatgatgtcagtgccgtgacctcaaatatataggacccgtagtagaaaagaggagtaattggaagcgatggaagagctacagtttccaagcgcttgtgatactcagatataggacctaaatcgtttgcaaggtccggtggcagttcgcccgcctgcctacgtacgtgcccaggtgcgcaaagacgctgagtcagcggcagcggaccttaacccggaccggttatagctctggagttgttggtgtcttttatatgggatgagattattagatgtcaggcagagttgttcatctaatacatttaggcttccaactgatagtcacaaccgaagtgttttgtatacaatcttctattggtcttattgcagtagaattccaagcaaagaggatcttcacttcctcatgtttaaagtcatcttctgtcagtgatgtatacgctctgaaggaggctatggataatacacactggacaagacttaaaataaatgggatcattggctcgcttatggtagatggggtgattataagctggacacttcgtacttctagagttgctattttgatactactagtacctacattcacgaagtacggagtacctatatcaatcatctgtcatctatagtagagatatacagagcacaccgtaggcgatcttgtgcattatcgggtacttatttgctttagatctcgatgctttctacacacatatcactaatacaagaatagccccaaagaattgatgtagaatttacatacaaggcatacagttctatgtaaatgcaagtatctaggccttgctcatgttccacactgaatagtacaccaagatattttattttaaaaagtatggaagaataaggagaacaagaaggagaagagagagctgtctaagatgacctcgggaagatccgaagtggcggacaccattaatcaccatgtggtcatggccatgtcattatcctttttcgatatatatccagcgcggaattgattctcctgttaagcaattgaatctcccgaaacaacattactatccaaaacaacctcatttataacctcaatcatgattagcatgtcagaagccttctatcaaggtcggagaccgatgaagtcagtatctgccctgggagtagatgttctatactgacacagaatataatcagaggtcgcagcatcgccttgctaagtgtctttggcgtcattggtggtacagctttaatgttccgcttcctagctccccagccaggcacgctcaatacgagcaaagaggtagcgacgtaccggggtggcgagtctgaacaaacagatcaaggcgataaatttggacgcactgcccacccgcctcgaaaggaatatccagtgtccaggccaaagttttaaggggaaatggtgccgggaagcatgaagcgtactaggaaataaggattggattggctagaaaggttggaatattgaagatttcatgtatggattgatgaatattgaacgtcgaagccgttatgtaccccgaatgagatggtatctggtatccgcaaatcaaaaagccaacgcgccaggtcaaaagtagatatctagaaagcaaaagatcctccgaatcaatttacaggaatttttacacggtgctagcaccaaaggatagaatgtactgaatagttaagaagacggcagggtatcatcacccggctgatttcctgtgaatgggtcttcaccactagcagcccggcttgcaggtgaagcgacactcttcttcttcgagtctttcttgtcacgcttcttcttctcacgcgtagccccccgggactcgtccggtcggcttgggctgcggctagactcgctgcggcgaagatctttgaattctttaatcacctcacggaacccttcttcgatgttgttcatgcgagctagaaccaacttgctgagcatgtcttgggtttgggttgggggttcacgacgaacgggtggggcaaatcctagttgggtctggaaacttgacgggagggcaccggaaaagccactcgccacggccttgttgtcgcctagatcagatcccagatcgtagagaagggatgatcgaggtcgggtgcccgtggaccgattagttaggtaatctatatcgggaacggacatatgtagtccaattggagggttccgagcacgagatatgtcgtgacgcttcatggtaccctgatctaacgaggtagaggcaaaagggggtgattctccatcggaggaatccgtatccggccgtgtaggtgtgacccggccttcggtctcttcatctagagatccaactggattgtacaacatggtgaccccagaagcattccgtgtatgtctgatgcgacgtgtagggctgttgcggcgcgacatcattcttgcggtagatggacgagagctgtagaacttgggcgacggcctctccgcaccttcaaccgagtcagctgtctcacccgtggaccctagagccgattgcttgttatcatttgagtcaccatcgttgctggtaagttcgtcatcaccctccatgtctgtatgaagggagagttgtcgtttctgagtgggcgagatagagggtcttgtgcgccgagaccggatgactgggctggctgcgcagcttgttcggtcctcaggattcgaagcaactgatcgggtggtttcggtgaaatctcgaggtgggttagataatctagcgcggaatggaaatttgaatcgttgtcggtgcatgccatgacggtccgcaactagcgagtccacatcatcgggtccattagctggtccagagccgatctcctgcatccagtctttgatgacattattggtctggcgttcatgcacagtgcttggtggccctcgcattcgatcgccacgatatgggcgtcgaaacacttcctccaacgcccgatccttctggtatgttgccacagatggctcccgtctgagaaccgatgcactggtgctgaaaccacggaatcgacgtggctgttggatatgagctggtgtttcattttgtgaagtaggttcaattagatccatcggctggacgactcgagaactgaggattgtcttctcatagaggcaaattgtaaataatatgggtaagtgggttatcttgataatggtccgattgagccgaatgaagtcacggaacggcatcagggatcggaatggtgtcactagccaggcaatgatgtttgttggtgccacataagagaacaaagcatcagacttgaccatcgagatggtattgacagcgaacaagaactgatgttcttcatttgcattctggacaattctcatgaaagaattggttagaaccgtgatcaagatagtgacgacgacgaaatgacagatgaacaggaaaaccgtcagaattgttctccctaaaaagttgtattcatcccacattgcccatgcggttggcgtaaatcccatcagcatctgaaacaaaccataagccaccactttgggggacttgttgtctccaaagtacaagaaagagacaaaaaagccagagcaagaaatgacgatgagtacgaagacggcaatcaggtctgaggccattattcggaaagcaatgaggagttgggagaaatagcgataatgatccaatatagaaaacaacctcgggaatagcaaaggagctgtagctgtaagaacatcgaactgagatggattagcatgtgccgataaaagtaccctggtaaacataaaaacgtacggcttgatcggcgatgtattcacttctagggtaggtcaggaatgtgccgtatatcctcaagcaataatatgcgaagagcaatagcaaaatcccgacgtcgaacagattccagaagctcatcagataaagactaaagccttgctcattgaacccaacaacttcatcaagcatgaatccggcactccaaaaccagaataagatctcaagagatgtgatcctgcggctgcgctgttccaaaaccgccaggaacagtcccaagagtactgcaaaggatagggtggaaagaaactgccgatagcgcggcactctcagccgcgataatttgaacaaagatgcgtcccgggggttgtagatcgtcactgaccgccgaagtatcttattgctggactcggtcgtattatcatcattgggatccattgttgccccataatccaggtttccaccttggttcatgctcatagagcgatggagactgtcggcggccgagtggaagacaaccgtccccgcccagatagcctccaattgttgcacgacgacaggatgggccaagaatcgcttggcctgcgcgcggatagcaacctctaagcatgagacacgggccgcaaccacccgtttccgatgagggccagtgactaatattgtggattgatcctggccctgaagtggatagaactcgtaggacagcgcatcgatcaattcgcgggtcgagtattcccgcaatagctttatcgccaacagttcactgaccattgcccgtgtctgatttgccccgctattccccggacttaggtgtatttctctctcgaattgcagacagttggccatcaatgcatagagggtcgcgcgcgaaaagtgggccgacatgattttctgcaggatcggcttgatcaggaactgggagacctgcggcgagcgtagttggtcccatgtgagggtggtttcgcagcgtgaagcgatcaaaggacgaatggcgtgggtgatgttgtaaacaggcagcgcatctaatcatgttggtcaattgtccgtatacaccgtacctcaaggatctccgtacccaaatgcgacgcagagaacataggcaatagaggtgtagactcgagtggtccgtcctcttcctcttccccttcctcccagtcctggtccatatcttcctcatcgatttcgtgaagctctggcgcatcatcgctgctttcatcggctcgagggacgcgtcgcgagttgttgtgtgtggagcgaaaccacggggagggggttgagaatggggactgctcgacctgcccgcgctggcgctttggacgcagcagcgaggcgaacatggcgaggaaacttcaaggtctaaatcagcataaccgaagttgtttgttgggaggttgtaggatgctagagcattccggaaaagagcgcgcgagaaaactaaagagggaaaagggcaggagaccaaagtaagaaggtgaaggtttgctcaagcccaggtgaaagcggaactaactccaaagatatcgtatgtaccttttggtgttagagggaaatctaagttcttactatggccaaccccccacgtcattgtgctgataaccccggttcactccttgtaagcttatttgttcttcggtgtttaccctttcatacatagatcttagatcttagatctttaaatgtttaaatgtttaaatgtttaatctttggactgtccaatattatatcagccttcagttttaagggagatcgcttattatcttggccgtaatcttgattccacagtatgcagaggatgtacatccagagcctgcatatacagatgcaacagaattcgacaggtcagaaatactcgccacacatgtaacagaagggatgaccggcattgtactacacatttttgagacgagacagcaagatgtcttatatatatatctaaggtttttctgctccgtatactccgtaaacatgtgaatacccgactgccccaatatacgatatcgttatcggcccactgcccgtgcattgcatcatatgcagtaacgcgtgcatgtagatagagaatcactaatcccccaaacttctcaattgaaccgtataccataaaaaaagagtactacaatagcacaatgctctctatagaaaccagagcaacggaaaatctctgcggtgaaacggattgtccgaaagcagaaaaagagtggggctagaaaaagctttttgcatgaaaatattttctgccgaacttgctttttctctcttcctcctccacagctggttgcagcaaacagtttcttgtctttccttctttatatatctatactcccttctgcggtcctttctttccttgcaagccaaacaaacaaaatttcacagatgaactagagtgacctgctcgcacgagatcgcactagatcgtccccgagaggacttgttccctcacaccaattacgatgtctcccaattcccttgaggatccaactctgcctaccagcccacacctgggtagtgtagtcggatacccagaggcccagtccaacatggattccgtcagtggagtgatcaagccggcctccatcccaattcggggtggctcagaccggttggtcgccctcgaactcgcagatggtactgtctaccaaggttacaactttggtgctgaaaagagtgcctcgggtgaattggtcttccagactggtatggtcggttatcccgagtctatcaccgacccttcataccgtggccagatcctggtcatcactttcccgctcgtgggtaactacggtgtcccttcgcacgatgagatgtgtgagctcctgaaggacttgcccaagcacttcgagtccagtcagattcacatttcggccttggtggtggcatcctacgccggtgaggattactcgcacttcttggccaagtcctccctgggcgattggctcaagtccgagggcattccggctatgcacggtgtcgacactcgtgctttgactaagcgccttcgtgagaccggtagcatgctgggtcgcatgttgctgcaaaagtctggctcccctcctgatgttgctgctactagcggtgtcgactggaagtcacacttcgaggagactgaatgggtggatcccaacacaaagaacctcgtcgctgagggtgagtgatctaccaagcttctacatgaaaaagtaaaggttttctgacatcattttttattcttacagtctcgattcgcgaacctcgcctattcacaccccccgccaatgtcgccctcaaacacccctcgggccgtggagtccgcgtcctttgcttggatgtcggtatgaagtacaaccagctgcgttgtttgcttgcccgcggtgtcgaggttctggttgtgccatgggactatgatttccccacccttgctggaaaggacttcgacggtctcttcgtgtccaacggtcctggtgatcccgcgacccttactgttaccattaagaacctgaccaagatgttcgaggatgctcgtactcccgtcttcggtatctgtctgggtcaccagttgattgctcgtgctgtcggcgctcagactaccaagatgaagttcggtaaccgtggtcacaacatcccctgcacaagcatgctctctggcaagtgccacattacttcccagaaccatggttttgctgtggatgccagcagccttcataacggatgggaagagctgttcgtcaacgccaatgacggcagcaacgagggtattcgtcacaccagccgtcccttcttcagtgttcaattccatcccgagagcacacccggcccccgggataccgagtacctgtttgatgtgttcatcaacaccatccagtctaccattgactcccccgaggctctcaacatgcctgtctccttccccggtggcaccaaggccgataatctcctggccgcccccaaagtctcggtcaagaaggttctggttcttggctccggtggtcttagcattggtcaggctggagagttcgattactctggcagtcaagccatcaaggccttgaaggaagagggtatctacaccattttgatcaaccccaatattgccaccattcagacctccaagggtctggctgacaaggtttacttcctgcccgtcaacgccgagttcgtccgcaaggtgatcaagcacgagcgtcctgatgccatctacgtcactttcggtggccagactgccctttccgtgggtatccagcttaaggacgagttcgaagaactcggcgtcaaggtcctcggtacccctattgatactatcatcactactgaggatcgtgagctgtttgctcgcagcatggattccatcaacgagaagtgcgccaagtctgcctctgcttccaccctcgaggagtccctgcgtgtggttgaggacattggtttccccgtcattgttcgtgccgcctacgctcttggtggacttggcagtggtttcgcggaggacatggatcagctgaaggagctctgcactaaggctttggccgtcagcccccaggtgctgattgagcgcagtatgaagggctggaaggagattgaatacgaggttgttcgtgatgcccaggacaactgcatcactgtctgcaacatggagaacttcgatccccttggtattcacactggtgactccattgtcgttgctccttcccagaccctctcagacgaagactacaacatgctacgaaccaccgcagtcaacgtcattcgtcacctcggtgttgtcggtgaatgtaacattcagtatgccctcaaccccttctcgagggagtactgtatcattgaagtcaacgctcgtctgtctcggtcctccgccctggcctctaaggctaccggataccctcttgctttcattgctgccaagttgggtcttggtatccccctgaatgagattaagaattcggtcacccagtccacttgcgcctgcttcgagccatcgctcgactactgcgtggttaagattcctcgttgggatctgaagaagtttacccgtgtgtctactcagcttggttcttccatgaagagtgtcggtgaagttatgagcattggccgaaccttcgaggaagctattcagaaggctattcgctcggttgatttccacaacgttggtttcaatgagtccgatgccctcatgtccatcaagggcgagctccagactccctccgaccagcgtctgtttgccattgccaatgccatggccgccggttacactgttgatgacatctggaaactcaccaacattgacaagtggttcctcagccgactcaagggcctcagcgacttcggcaagtccatgtccaccttcaatgctaccactgtgcctgtgcctatgatccgacaggccaagcagcttggtttctccgatcgtcagctcgccaacttcttggactccaacgagcttgctgtgcgccgcatgcgtgttgaggctggtatcacacctatcgtcaagcagattgatactgttgccgccgaattcccagccgtgaccaactacctatacctcacctataatgcttctcagcatgacctgacgttcgacgatcacggtatcatggttctgggttctggtgtctaccgtatcggttcctctgtcgaattcgattggtgttccgtgcgtaccattcgtacgctccgcgagcagggctacaagactatcatggtcaactacaacccggagaccgttagtaccgattacgatgaggccgaccgcctttacttcgagaacatcaacctggagactgttctggacatttaccaactggagacttccagcggtgtgatcatgtccatgggtggtcagaccccgaacaacatcgctctgcctcttcaccgcctcaatgtcaacatcctgggtacttcccccgagatgattgatggtgctgagaaccgttacaagttctcccgcatgttggatcgtatcgaagttgatcagcccgcttggaaggagctgactagcattgacgaggcccgcgatttctgtgacaaggtcggctaccccgtgctggtccgtccttcatacgtgctctctggtgctgccatgaacactgtgtattccgagcacgatctggccagctatttgaaccaggctgtcgatgtttcgcgtgagcaccctgtggttatcactaagtatatcgaaaacgccaaggagattgagatggacgctgttgcccgtaacggtgttatggttggccacttcatctccgagcacgttgaaaatgctggtgttcactctggtgacgctactctgatcctacctccccaggatttgagcccggagaccgtgcgtcgcattgaggaggctacccggaagatcggtaatgctctgaacgttactggcccttacaacattcagttcattgccaaggataatgacatcaaggtcattgagtgtaacgttcgtgcctcgcgatcgttccccttcgtgtccaaggtcatgggtgttgacctcatcgagatggccaccaaggccatgatgggaattccattccaggagtacccccctgtgtcaattcctaaggactacgtcggtgttaaggtcccccagttctcgttctcacgtctgtccggtgccgaccccgtcctgggtgtcgagatggcctctactggtgaggttgcctcgttcggtcgtgacaagtacgaggcctacctgaaggctctgttgtccactggattccgtcttccccgccgcaacattctgttctccattggttcctacaaggagaagcttgagatgctaccctcgatcaagaagctccacaatcttgattacaacctgttcgccactgctggtaccgctgatttccttaaggagaacggcgtgcctgtcaagtaccttgagcatcttccggaccacgaggaggagcagatgaagtctgagtactctctcacccagcacttgtccaacaacctcatcgatctgtacatcaacttgccgtccaacaaccgcttccgccgccctgccaattacatgtccaagggttaccgtactcgtcgtatggctgttgactaccagactcctctggtcaccaacgtgaagaatgcgaagatcttgatcgaggctattgctcgccacttccctctgaacatcatccccgccgactaccagactagccaccgcactgtggtcctccccggtttgatcaatattgctgcgttcgtcccgaaccttgtctccgttggttccaaggacttcgaagctgtttccaaggcttcgatttcaggtggtttcagcatgatccgtgtgatgccggtcggtgttcacagctcggtcacatcggcccgcgacctcaagattgtccagcagaacgctctgggcaagtcgctctgcgacttcaacatctctgttgctgccactgccaccaactcagaccagatcatccagatgactggtgaggttggctctctcttcgtacccttcaaccacttgtcgggtaacatcaacaaggtggccactgtcaccaaccacttcagctcctggccctcaagcaaacccctgatcacggatgccaagagcaatgatctcgcctcgattctgttgttggccagcctccacagccgtaacattcacgtcatgagtgttacctccaaggaggatatcagccttattgctctgagcaaggagaagggcctgaaggtgacctgcgatgttgctatctactgccttttcctctcccgcgaggatttcccgacctgcagcttcctgcccaccgccgaggaccagcaggctctatgggaccatatgagcaccatcgatatcttctctattggcagcattcccttccagcttgctggcaagcaggctactcccgagtccggcatcgctgaggctattcctctgctgttcaccgctgtcgccgagggccgcctgaccattgaggacatcaccgctcgtctctatgagaaccccaagaagatcttcgagctgcacgaccaggccgatagctcgctcgaggtcgaggttgaccgcccctacgttttccagaatccccaagcctggtctccgttcaacggcaagacgttgcgtggctccgttcagcgtgttgttttccagggcaagaccacctgcctcgatggcgagatcaccaaggatgccatcaagggtaccgacatgtccactcaccgtatcgtccctacctcgcctgtgctgaagcccgtgacccccatggttcgcccggagagttcccttgacaaacacgggtctatcggtggtactcctggccgccgcttccgggccctgtccagcgctgtcggcgaacttggtcctcctctttacgtcgcctcctcgcaggtctcaccctcgctggctgatatgctctcccgatctgctttccggggaaagcacatcctgtctgtgaaccagttctctcgcgccgacttgcacctgctgttcaccgtcgctcaggagatgcgtcttggagtccagcgccacggtgttcttgacctcctgaagggccgtgttttgaccaccctcttctacgagccctccacgcgcacctcggcctctttcgacgccgccatgcagcgcctcggtggacgtaccattgccatctccactcagcactcttctacccagaagggtgagtctctccaggacaccatccgcactctcggctgctacggtgacgctgttgttctgcgccaccccgactcgaccagcaccgagatcgcggccaaatactcccaggtccccgtcatcaacggtggcaacggtgcccttgagcaccccacccaggccttcttagacttgttcaccatccgcgaggagttgggcactgtcaccgggttgaccatcaccttcactggtgatctcaagtacggccgccccgtgcactccctcatcaagctgctccagttctacgatgtccgcatccagcttgttgcccccaaggctctcgctctccccgacgatgtccgccagcagatcgttgcttccggccagttggtcctcgagtctgaggagctcactcctgagattgtcgccagctccgacatactgtactccactcgtgtgcagaaggagcgcttcgtcgacattattgagtacgagcgtctcaagaacacctttatcatcgacaacgctctgctcaagcacgccaagagccacatggttgtcatgcatcccctccctcgcaatgccgagatctctgaggaagtcgacttcgaccagcgggctgcttacttccgccaggtatgtttctgaatttcccttgctgtctctgaacaatgaactaattgcattatagatgcgctacggcctctactgccgcatggctctccttgctctcgtcttggcgccatgaatatgatactcttttgccattctaattatgtgggaaaggaggatcccaaaagcgccatggatttacgtgagacgttttgttttccttgttgtttgaaaagttatgtttttcgatactccgtaatcagcgtgataaatcgctgtatagattagatgaatctccgtttcatttgacggtcccgttcagtgtatgtctctatttctatgtgtgtatgttatgtgatatgtgtcatatgtgtgttatgcgttatgtgtgttgtgtgtgtgtcgtgttttcctttttggggtcatttgggattctttcggggtcatttcggggatttcggggattcttttgggacttggcgtcttttttgcattttatatacccactctgacaatatacttcattaattcatctgagcccgaactttttttcaagtttggaacacccagcgaggatccttatccccttggaactctccctccgcatcacccacgtctcccatcaacgggctcagtccccggacttccctcagacgctccttttcagcattttcccgtcggagaacgtgccataggatcccaacaaccacaatgttggcaactagatatcccaaggcaaatccatgacccaggaagtaccgcggggcactctcagcgcggtaaagctgtgttccaaggaccgcacccagattcccaattgagatctgcatggcgttggcaatgcaacgcttagtctggccggacacattattggcgggccaggacagcacaatagccacagctgggtaaatgcctgccgcagcgaagatagttccaacgtaagacacgccagcccggtgctgtgacagcaggagaatgtatccgatacatccaacggcagatgatcccatgataaacggggcgcgactgcgagtcttctcagaagcaatcgcaacaccaatagttgagaagaacgacactgcgtacggtggaacggacagtagctgcgcctttgcggctgagtatccgagttctttgatgatggtcggaaggaaaagtgataaagtatacagtggcaaggacattgtgtggaagccaagtccatatagccagactttggggtctttgaaggcatcctgtactgccgaccaggtgaattcctcatcccgagtggcatcgctgtcgttcttcagacgcaattggatgaactcccgttcttcttttgatagaaactcggctgttgatgggtagttgtatacccagaaataggcgatgatcgaagcaacaatggtcaacagtccttcctaaattgattgtcagctatgatagtgcatggtatagttgatcgggacgcaccaagatgaaaatccacctccaaccattcaagtttcctacacctttcatgtgagagattgcctagaaacccattagcttggttatctaccaggagaagaaaaccaacccaagccaggataccaccaaaggcacctgccatcgaggcagagctgaaaaacagagccacgcgataatgttgctcgttccgcttataccacatggacagataaaacaccacaccggggaacaatccgctctctgcaacacccaggaagaatcgcgaagacagatatccagagtaattctgtactactcctagaagtgtagctactactccccagaccagagtgagagtcggaagccatattctcggggtggttttcttcaagacgatctgaatgtagctgttagtctttgtacaggacatttatattcataggcgttactcacattgcaaggaatctcaaaaataacatagccgataaagtacagagtcaggcctgtaaggtactggtctcctgctatattccagttaatcctcggatcaatatgaagacacacaaaacgtacacattttgatgtcggtcgtcattccttctagacgggcatttcccacattgctgcgatccaaaaaggagagcaaatagagtaatgtgaggggtggcaaaagacgatagtccaatttccgtaacaaggccttctcgttgatgcccttgatacttggagaatcgctggcgtccatctcggcgccagtgcgcacatcgtccttttctgaagtagccatagtaactcacgggggactcagtcttgaattgaggcttggattaaggctatcatatatggagagagggggataggagaaatatataacatttagcacaccatccattaccccgccaataaatcattcttccatagagagagcgaataaggtcaccgatataggtgatatcaaaagagaatgagcaacattggggctggaatgacgagagctgattccatgtgaagatcggcaagatgcatgaatagcgtattctacgagtcctatgttacaccgtgaagtatagaggtcgtataagcggccatctgttcttattcttacttactacaaatccatggaaatttctcaggaggttgatatgacgatcagagtacttcatactgtaagaaattacttcaaagaaggcggatgaaatgtactatattgtttagttggatctttgtatttctcatgtctatgctcagtctatagtggtactcccagaatgtatgttcgctaattgacacacctggccatgtcttacccttcatccgtcagctcatgccttatccggccagtacttctgtacaatgaccttcttattgaccttgcccatggcattgcgctcgattccatccacaaccttcaaaacagttgggattttataaggagccatctcgttcttgagcgcagcgcgtagagtaggaagatccagcggtgtagtctatgtcactgttagttatgcaaaaagaacagttgcccttcatggactcaacgaaaacgtaccccttctcggaacttgacaactgcagcaactcgttgcccccattcctggtcggccaatccgactatagcaacttcttgaatcgcatgaatggccagcatcttgcgctcaacttccaacgccgaaatcttatatccaccggatttgattaagtcgacagaagcacggccttgaatgaagtatgcgccgcttgaatcgcgtttagcgacatcgccggtcttgaaccatccatccactgtgaattccgaggccgtcgcttccggcttccgccagtattcgtagaagacattaccgcccttgatctcgatcatgccgtcctcatccacttcgtccacaatacgaccggtttctttttcggtcagtcgcacctcgacaccaggtaatggccatcccacactgccatcgattcgcttttcaatctccagcccacagctgatcgccatgccaatctcggtcattccatatcgctccaatagaacctgaccagtgatctccgcgaatttttctttgatgggggtgggtagggccgcagatccactgacgaccagtcgtagagcacgagctccagcccgcgcggcatcttcttgttccgtgccgcggatatgagcatcgaagtagtcattcagacgggagtaaatggtcggcacagccatgaacaaggttgaggagccagcgtcctgccaccgctcccagatcaccttcggatcgaattttggatgcatctccactgtggtaccactcaggaaactggcagccaggccattgacgatgccgtggacgtggtggagtggcagcacgtgaatgagacggtctgagggagagtactcccaggccttgactagacagctcgcttggaatgtgatattcccgtgtgttgtcacgcagcccttggggtttgatgtggttccagaggtatagatcatcagggcgcgtcgagtgagctcaaacggcggggagaaagaaggtaaggtcggggcctcatttcgagagaatggctccagtcccataaagggtatatcagtggtgcatccttcgcgtagtaatggtgcgatcttctcaaattccgggtgcacgataatcaatgaggggtccgaatcaccgatggtgtataacagttccttcactgggtgacttgtgcctagcgaatgtcagcgtcgaatagaagatgttgcgcattgctgccatcgctttcacctacaaagtggaacgcagacacctcccgcggcccacacggcccattgtgtcgcaacgtagtcatatccattggggaccaagaaggcaatgcgtcgttcttccaaatcgtccgtcaatctcaattgctcaattatgcgcttcctcaatgctgctgcatcagctagtaattgaacgaaagtgaaggattgttgtttggtagcatcaacgaccgcgatcttgtccggatcttgtcgtgcatgttgctccgccgcagcaaagaggggtagcaaagggatgggcataattaatttgattcttggacactttgactctaaagatgaatcattcaatataagtctaataatctggaggggtaaagtcgaagaatttgagggacatacggaatcccccagggctgtatttagccgattgcggagaaaacgccatgtccaccatggacgggtgggcggcacccggatgattatgtaattatgctcaaaggtcccccgcccctaggtcttggcatactcggtcataagatattccactccgatctcggttcatatatcgcccaccagctatttaaagatgtaaggggaattggtccttcacagcaccttgtgtctgaaagagctggcaatatggccactgtcaatagcccgctactgcaaaatgacatacagcaaagctccttgggtgataccacccagacatcacctgaactcgaccgatcgaagcagcctcgagctaatatatcaaaaatattggctatatttttggctttcttaatgatgggggcaaatgatgcagcatatggcgtaagtacttcgcgaagaatcgaaatgcgatattgctaacacgcaaaagcctctattaccatatgtaagtacctatctaaaaccgtccctatgaacactctaatgaaaagaacagctcgaatcgtactacagcatctcccacacagtggcttcatttcttttcctgtcacctgtctgtggctatgtacttgctgcagttctaaacgacacaattcacactaagctaggtcgtcgtggcgttgcctggatttcctccggtaaccatttcatcggccatctctttgtatctttacatcctccataccctgctctagtcgctcttttcgtccttcagggctttggaaatggcttggcagactcggggtacaacgcctgggtcgccagtatgaccaacgcaaatcaaatactcgggattatgcacgggctgtatggatttggggctgttctaagtccacttgcagcaacgttacttgtgaccaaggctaacttgccatggttttacttttactatcttatggtatgtctttcggtctcggcgaataaaagttggtaactgatcagcagactgcttgcgcaataattgaattgatcttctgcctgggagtatttcgagactcaaccgcagctgctttccgggctgccaatcagaccgaagagcaccaagatgggaatatgagtcgagccatcgctcaacccccatatgcacgcataacttggatctgttcctttttcttccttggttacatgggggttgaagtcgcgctaggtggatggattgttacttatatgagggaagtaagaggtgggaaggcatttgccagtggtatgactgccacagggttctggcttggaatcagttgtggcagaatgattcttggcttcgttaccccgctgctaacggaggagtttgccgtcattgtgagttcccctgtgtggtatattacactaaattcatctttccttcaacttgacttgatatcttttacgcgtgtcaggaggctttcatacttactaataattacgcagatctattccctgctttcaattctctgcggtttcattctctggctcgtgcccgtgttctcagtttcagcagttgctgtcacagtcctcggatttttcttaggtccatttttccctgctgcgattgtagtcgccaccaggattcttccccgggctttacatgtgagcgctgtcggcttcgcttcagccattggaggagctggagctgcgattctgccgtttgcagtgggtgctattgcccaaaggagtggtgttcaggttctgccgccaatcatcattgttttgatcatcggcattttgtcattgtggctcttcctcctacaaagcgcaaagaatatcgcacattagttacatctcaatcggcgaaacaatatcgtcggccaagtgccactatcgacgtgatcgcaggatgaacaagacattaggagagtgacacgcgaaacaagggtttttggagcagcgggggatagcgcatgttaggtccgtctgcctcggtattagggtggaaaagaataatttgttttgtctagacataataacaaaacaaatttcaaaccgaggtcgctaattcaacattcgctattactttaataaactaaagtatggctaccgcggatggtgcctgtgccagttcgcccggttggacggtgcgaggcccgtcaaacgatccttcgccattttcttccagcccacgggccaccaagtctgtgaaatcgacacccacttccaccaagagagcggcatggtcgtgcacaatgtcgaggcatttctgccagaccgatgtgccacgctgaacgctgctaagctgtcggctgagcagagcattgaacccgtccaggtgatgtttagcccaacgaatgcaagagctgctcattaccacagggaagcattgttggtagataccgatcgtgttcttgatcagggtaaaatagacataggagatctggaagatgtaaagaggtagatcaccttcaaagatacaggcactaggaaaagaagttagtatgcaaacataagcttgtgtggtggaggacgaagaacataccggatgcgttggccaatcacgtccgaacgtgccttcaggtaggtctcacgtgcctggtcttcaaaccctaaccgtgtcaaccaggtaacgtgagtcttggtagccaccgggaatgagtgtttgtcgaccagtgcccgggagagaatgccagcaagccgagtcgctcgcccatcgaccttgaaattgatgacgtcttgtgcaatgctgttgcccttgagacccttggccatttttcttagtcgctcgatgctgtacacagacgcctcaaatcgctggagcgcaatatctatatcaagttcgtccacctgcccttcaacccagcggagattctgctgtttcccgtccacatcaatgcgcaggtcaggcttgtctcttggagtatcagagaggtcaaaagactcgggcttttgcgaatgggaaaggtgccgaccagccagatatccgtatgcttcgaagggcttgctggccgcttcggtttccgagcgcatggttcgacgtaggtcctcgactgttttgcggaatgttgccagtagttcctgtttcgctgcaacgtcgtcatggcgatatgtaaagggcttgtttcccacacggatactgatcgatctcccaatgcctcgctctaaagcctcttcgcgcgcttggcccgttcccaaattggctccaagatcaatcatatcaacatcattaagaagccagcaatcttctgctactagcctcgtcggaacaggtcctcggtggttggggttgctttggtcgacccgcttacgcttcttcgcagccacgagcaggtaatcgttcaataacacaatgtgaacgggccgttttggtttccatgtggctgagtccagctcaacccaattacctgtttctaggacaatgtgccgtcctggtgcagctggaagccacttttgcgacccttccactgtcttccacaacgtttgcagctgcacgctccacatgctctcaaggttggcgaccgagctccgattcgcatttcgtttggggaaagactcctccatcggtgacatgggattaggtgagtttcctacgcttgtttgtccgagcgccgttgttagttccgccatgagggtacggagagtccgcatttcatccttgagcttctccgcctctttactgattttgataaattgtgtgcgattctgatagacattttgttgtagatcggtggatgttcggttcttgactttgcgtaggctttcttggtacttttggatgtcttcctcggacgcgttggcgagaagactggctacatctaatatcggaaactcctggttagcttgaacaagcacacagcggcggccagggagctctaacatcgatcgactggaagactgggatctcgtagagcatgcaggtcgactttcggtgctggtgaattcgggtccgatggtgatggtagtctcggaatagatgccggtgctaatccgccatgtcctccgggcatctgatttggaagcgtcggaacaggaggaacattgccatcagattcaggtgcgccattgaatcgactcgagtatcgccgtttcactaaatccgaggtcgcatcgttctgaggtgcccgctcacgtgtggggattgcggatgggcctgcatcgggagacctggtattgggaggtagaggaccggatatgggcttaggagcactgatctgagggcgctgccgacgagtcttgctcctcagagtcaatcctcggccttccatggtgatttcacttagcaatgcagcaataatcaaggaatggagtcgtctcgggaggtcaaggggatgacgctcgggctgtgggtatgattatataatccatgggctccggacatctggacatcctcgaaacatttttatcacccaactaccactcaaccactatcgcctctcaaagtcccatacattgccaggctgagaaaatccgatacgtttaattagatatcatcccacattttcgctatggctttccgaaacaccgccatcgtcgccggcacacttctgacgggagttctcggtatgtagcattcgtctcgccgcgtttttcaattattaaccctttataccagcctacgccgtttatttcgattacaagcgtcaaagcgatcctaacttccgcaaatcgctgaagaagaacaacaagaaggtcgcacaaaccgcgaagcaggaagccgaggccggcgccgcagctagggccgcagagctcaagaatgcgctcgaacaagtgaagaggaacggtgaacttccaacggatctcgaagaaaaagaaagcttctttatgagccaagtcgcattgggcgaatctctttgtgcctcggaaggtaaattgaatccattttctcatcctatctccatatcgaacgatgggatggagatatcggttacacgtcgcaatcggaatcaacaggtcgctaaatacatctccaggctcccaagtcgaagcagccattgccttctggaaagcattgaaggtctacccccagcctcaggtaagtacaagccattgcggatgtcacatattgccttcatcgtcctcttcatcattctaactgctgtaattactcaggatttgatcggaatttacgacaagaccgttcccagagaaaccctcgaaattctcgccgagcttatcgcacttgatggtggtcaatctgctggccccaagactggcaccgacgacaacatcgaatagacaactggacctgaccgcccctcaacaacttgtattttagacagatggaattctcaaatttgtatgacataatttatatcgcggagaactagtacgttcgttacccaagagccgtgggggaagcggataaagaggtgtggatgaaggctactatgtaagttggacggattgatggcgatctattgccaaacattccaattagatggagcaaaagagataccaccaatctaaagctacctctcgattttggcttctgtcctatgaagtagtataggtatttttattttctttctatgagacatctatagactggtcgattgttagaactactccataacatcctctctttcactacaaaaccttccaccatcaatcatagaaagttaatcttacagtaatatggctgtgagtactgcgtacattgaaaaaaaaaaaataagataatttatggttcttccattttgtgtactccacagcggctatgtaagacgaggaatttccacaggtaagtaatgacatcttatgcaatttctagtccccagttgatatgtggatgtgaattgaaagcaggaagaggaagaggaagaggaagaagaagaagaagaagaagaagaagaagaagaagaagaagaggaagctaagcgaatggatgagtacgagtagtacggagtagaggtcagagagacactggttggataggaggtccggagccaagggggctttccgtccgctatctattgccaagacatatgttgattccaagactttttaactttgaattgttccagttggaaacggtcatagtgggagaggatacatagagtgagagtagtatctaaaggaagagtaaataagaggttatgtatgaagtagatattccaatttaggcaggtggcattggacacccgaaagacaaggccactatttccaagccctaactaactaaccaactaaataactgcggattaattaaccacacttgggcataatctcaccactaactttataaattacagcatcgagacttatttccgtgcctatacccctgagtttggcatttcaatacagcctagattgcccagaggtggtccaagcaatcactattcaaggacatcttggccctgagtgggattcttggccggacttggcccaccaattcgtcttcggaggaaaaggaagggaaatgggaaagaaaatagaaatggacatttaatcgcttggaatacatgaatgtaattaatagtatgccactactaccatagaggactgcatagcaatatatactggatatagtgaaacgaagatgtgaaacctccaaggctctcccaagaccctccaagaccccccaagacccctattatttgttcagggactgcgattctccacaaaattgacactgacgatcaattgggtagctctacagagtagattaaaattatctcaaagccatttaactcctttgattccctttcttcctctttcctttgatttcagtcgttccttccccatttcgcgccgttgcgctgtccctcgttatctcatatcatctcgtatatcccccgcctcaagtcattccctctctagtttattgatttcctatacccacttgatttcacaatgatcgtatgtgcctgtcgcaactctattatgaccaaaagctgacctcttagtcttacactcgtctcttcgcatccgtgtgtgcgctcgccagcgccgcggctgctttgaatccactcgaagtcagcggcaaggactttgttgactccaagaccaaggatcgtttccagattatcggtgttgagtaagacttccttgcctttttcttgcctgtttcttaccccgcacattctacagtggctgacccctcaatagttaccagcccggtggtgaatctggtttcactacgaagcttgatcctctgagcgatgcagatgtctgcctgcgcgatgctgccctcatgcagcgcctgggtgtaagtctggaccccgtcttccttgccagacagcaacttatctccataggtcaacaccatccgtgtgtacaacctggaaccctctctcaaccacgacaagtgcgcgtcaatcttcaacgctgccggtatctacatgattcttgatgtcagcaaccccctgcccggtggttatctagaccgcagtgccccttggaccacatacagtgccatctactacaagcaggtgttcggtgttatcgagggcttcaagaactacgacaacgtcctgggcttcttcgccggcaacgaggtgattaatgaggatgccacttacatggctcccaagtatgtccgtgcgatcgttcgtgatatgaaggactacattgccaagaactctaagcgcgccatccccgttggatactccgctgccgatattcgtaacatcttgatggacactattcactacttcgagtgtgatctcaagaattcgacctcttcccgtgccgacttcttcggcctcaactcctactcttggtgcggtgactcctcctacaagaccagcggcttcgatgtcctaaccgaggacttcaccaacgccactatccccgttttcttctccgagtacggctgtaacgatgtcaagccccgtatcttcaccgaagtccaggccctctacggcgtggagatgacccaggctttctctggtggtctcgtttacgaatggacccaggagaataatctctacggcctggtcaagatcaacgactccaagaccgtgaccactcttatcgactatgacaacttccagaaacagctcaacaagctggatattgaccgcatcatgtcaagcaacgccacacaaaccagtgttaaggccgagacgtgcagtacctcacttatccagcgcaagtccttttacaacgcctgggatttgcccgaggtcccttccaaggtctcggactacattaagaacggcctgcccgatgcccccgttggcaagttggtttcggtctccgctaccaccattccccagaaggtgtatgactacaccggcaaagagattaccaatgtcaagtttgaggtgaagagcggtgccaacaccccatcttcttcctcggcttccagtacctccgattcttcctctagctccggtacttccaccgccaccaatggcgcctctcctaatggcgccccctcacttgcccttggtggtgcaggaggcttcttcatactgcttgcatcccttctgtaattgccttgatgatttgtaattatttcattcttgggtttcacagttcagacgacatgaccaagaggctgctatcggtctcgaggatctattttctgtatggcttatcctattttattctttgcccagctttcttgtgattcagttgttattctttacatagttccttcggaatgattcgtgtctttgctttttctttcgtgtcttcaaactttcagcaacaagccatcgcatgtacattgggaaggagttagagacaaaatgcaccatagcaaaaaatccttccactttctgctagtgcagttgtcattaacattgttatttatcccacattttatcaacatcacagcttagaagaaggatcgtcatttatcgtagctccaatggccgcccattgatcgaagcctttagccctagttctcaagacttgcttcaacatcttggtaattccgtttggatcgttgctggcaaattaaggaatgactttgcagcgtggcctgtcattttgcgcttcactaggtttcttctgttgaaaagagatagcagggtttcactggcaaagactacttaccttaaaactcggcttgctcagtaccataacatgagtcagaatgtctcgattgatataaatgcaaagacttgagaatattaagcaataacacgaaacacaaaaatcaaaatgaaaattgcaacataactcaagagattctaaatggccctcgctttccctttgcccttgcctgacgatgatgagacaggcgttggccctggcgagagggatggaaattcctcccactccttctcaccatcctcgcgactcttgccctcagccaagctgagctgaatcgcaaactctaaatcatccatctcttgctgtctactgctctccggctcctctgctccaggggatggctgtcgaggtgggcgtactcccttggcatacttgatagggatagacgatgtttgttgctcatcaagcaggctaaggcgaattgcttcggcaagttcatcgtcaacatcatcgtccgcgggatcttgataaggagacgaagaggatgaaatcccgccagggccaaatgaactaggaccagcagtgtcgaatgaagcgctcgtggccgagctggagaccgcggcgctgtccctaggtttcgccgcatcgccagagcaggcttcctcgctcagaagttgggcatacaacaaaagctgttcctcgtcgatatccggaccaagaagatcaattccaaaacgcgcactcagatgtgctcgttctttctcatcggcaatcctttgacgctccatatccacgcgttcgtcgtggataaagtcctcgattgcaccccgaccactgttgttaaagcgctggccttcgccagccccgttgctgccacgcattaagtggcgaaggcgtcgcttgctgcttttgtattgatcagcctcggaagagctgtaagaccagtatcgcaagtgggtgccaagtgagaccattccacgcagaacagttgggtctgtatcaaggcagatagcgcctgcggcatagtaattgtttccaacacctaagaaagaagactcagcctgcacaagccgacggcgggcccgcgttgaaaaacgcgagttgatcgttcgcattggcttggtagacgatgctaatggatcccaggcttgtacgaggccatcattaccgccatgaacaaggtacaaagatgtgatggccaaggaagatacctggggggagtcggtttggattgtgcgcaatgtggagatggagttgattatctccccagacttcgccgccggggctcggatgtcccaaacaaaaaccatcccagtgcgagttccaacagctaggtatcgagctcgttggccgggaatttctagacccgaccgcggcagatccatatgtggtaacattggggaggatgcggcagacgacatagagctcctagacatggccagaagaggatcctcttcggctgtgagagtggcgaaagtggacgtatccaacgcactactgctcacctccgtcgacttgcgatcatcaaaaacaaaatccgacagacgccacgtgaagttggtcgaaggcaatgccgtaagccctgaggaccgagaggagggaaaactgctggtggcagtcgggcttgttatgtccactgggccgccgaaaagtgacggtggaacttccactgtactcgataagggccctggcatggccgatgagccaaggacaggcctaggagcagtgcgcatgaaccgccggatcgacgcttttgtatcatcgcccgagccggtagcgatgataatgattgactcgcctgccccgcacccgtcatcgccagcaaagtccaccttaagatcgcgttgcatatcccagctttcgcagaccttgcggaagtgtttgggtttcaaagaaaagaaattctcaatctccttcgtttcagcggcaacctggtgctcattgagacccatggaatccgacgatgatcgcggactgtagcttccatcgaccaactcaggattgaaagggtctgggcgtgccacacgtctgcttgcttcaaccatctcccaatgcacacttctaccagtcttccaagccacctcgtcaagctgctcgatgttgagtttggctgtgagtgggatctcaggtgctcgaggaagttctgtgaggtagaatatttcccctagggcattgagagcaacagcccaaattcggtttcctgaatggcgctgggctgaatagtgatcatccaccgcaatggaaatgataggaacaccagggcacaggacccatctagcagtcacttgacctaggtcatatcgtctttcgtaagttggatgagggcctatagaatacgcggtcaacacgcctgaagacgatccagacatcatccccaccagcccctgagtgatcttgaggatctgaggggatttggcaatccacactgaacagatggcatgtgtgatcatgtttatggcaggtatgccgagtggtgggtgagaacccaaattcgaagctcccacaaaacgaccatgctgctccgtttttgagatgaaatagctacgcccttggggacagccctcaccatagatcatgccatatggttgactgacgtccatcgagttaggcacaccgaccatatcacccgatccgaggccgtattgcgcttcaccaggaaacagatcggcaaagtggcggaacatttggtggtcggtgacaccccaggtgccaacttttacggccgatgggtcactagctgacgcaatcccttgctctgcggctccatggacgaagagagggttgttgtccggcctgaaagaggcatgtatgtgactgatcggaaagagtagctgcgacgtatacgtagctatggcactaccatggcgagcactcgccgtgtgtacagttccatgcttcttggacgggttgaactgcgccggtttgcctctggctaacgagtgcatcaagcgagtacgcaatatgtattcgcttcgccaggaggctagcgcggttagccttgcgaataatcgcctgtccgactgtaggtccaccgcatcggtattacgctgaccatcctcaacggcatggggtccggggaagaatcgcgagaaggcgatcctccaagcatgaggagtggtcaccagcgcatgaaatcgatgggacaccaatgtgatggcggacaaagattggggtggtagatgcgagagaatatgggtgagaacctctgtggagattacggttgtcagtaataattgcgcagcaggtttgcaggacacccaccatttggaaatgtttccaaagatgtttgcgattgttcaatagaagccactaagcaagatccagcattttctgcttgtccgggtggaatgcgagcattttcatgctggctcactcgatcggccgagggcggggcatggcgaccgtcggcctctttcaaggacgcgtcttgtgtcgacatgctcgggacgtccgcatagtctctgatcgcctctcgctcgaggaaatcagagacttgaggttgagtttcgtcgaggtcatgtccatgctgggtgggactaataatgactgggtatgagtcgacgggaggcgtatgttgagacacggcagtaggctctggttgcataaaaaggtcttgacggaaaggtgaagtggtagcgaccgagccagcgagaaagcctgggtcagtcgagttaggaaatgcgggacgaaaaggagttatatgaaagcgaagcgatgttgaagagaaaggatgggagagaagcaaagatgccggaggcgaggcgaagtggccatcccgcacattatgcagatgcgcagcgaccgcagcgtcctattggcttttacaattcaccgccttcttctccgcctttttccgagtaattcctatacttcaattgttatgtctgactgagattttctatgactagttagatggataactaactactccgtagtagtcaaatactccgtatttggagctcatttgtagtggatttgtcatttatatagaagtagaatagtcagccgcttatatgacctctgtacttggcggtagaggacatgaataatttggatgctaaattagttcaagatctgtttaaatgaattttctaatgtcatttccaatggcttttgagtgtgtttgttgtgtctcttctagtgtcctttccggtgtcttttgatatcagtcgcaaattatccgattttctgctggcaataaaagcgtcggtatgcgatatgcggctctgttcgactttggatattactttagctatgcgagatggagaagaaaagctattatcttactttgagtgtaatactatcttatcaactgttgtcataatcttgttaaaaaattttcaaatatttttcctttaccttctctcaggaatatttatactgaatggccactatccaagacgcgctcagcacgtgacgacgcgacagaagccaaaccaacgagccctcaggtatcatcgactatctcagtacaacttggttgtgaggttgatatgatccccctggaataacttattgatccactgtatcttctcgagttattttcttctggtgccgcatgaaccccagtatcccgcataaacgccagagctgggtgagacacgtgaattcggtagactaagatgcctggagcaaatggtaagacattcccgatactgaatctatattcagcttactgatctccgtacagaggctgaaactattcgaattctcatctccaccgataatcatgtcggttacaacgagcgagatcccatccgtggggacgacagctggaagagcttccacgaaataatgtgtttggccaaggaacgggacgtcgatatggttctcctggctggagacttgttccatgagaataagccgtcgcgaaaatccatgtaccaggtcatgcggtcgattcgcatgaactgtttcggagacaagccgtgtgagctggagatgctcagcgatgcaagtgagaatttccagggggcattcaatcatgtcaactacgaggacctggatatcaacgtggcgattcctatcttctccatccacgggaatcacgacgacccctcgggagagggtcatctggccgcactagatttactgcaagtgtccggccttctcaactactacggccggactccggagtcagataacatccaaatcaagcctgtcttgctacagaaaggccggacaaagctcgcgctatacggaatgagtaacgttcgagacgagcgactgttccgtacctttcgcgatggcaaggttaaattcttccaaccgtctgtgcagaaaagtgactggttcaatttgatgtctgtgcatcagaaccatcatgcccatacagaaactagttacctaccagagaactttctgcccgaatttcttgatttggtcgtctggggtcacgaacatgaatgcctgattgatcctaggctcaatccagagactaaatttcatgttatgcaaccaggatcctctgtcgcaacatccttggtacccggggaggctgttccaaagcaaatctctattttgagcataacgggccgagaatttaaaaacgaacctatccgattgaagacggtgcgaccatttgtgatgcgggaaattatattatccgaagaaaaaagagcccaaaagcttgcgcgcaaggagaataaccgcacagaagtaactcggttcctcatgtccattgttgaagagctgattgaagaagccaatgcagaatggctagagatgcaaggggatcgcatcgatgaggatgaggatggcacatcggaggctccgcttcctctcgttcgcctccgcgtggaaacttctacgcctgaaggaggtagctacgattgtgaaaacccacaacgattttccaatcgcttcattggtaaggtcgctaacgtgaacgacgtggtgcaattctaccgcaagaaaaaagctgcttctacttcgcgcaaagatgataaatctgttgatgaatctaccatttctcatctatcagctcttgacactgtgcaagtcgaacagctagtgcgcgagtttctctcatcacagtcattaagcatcctgccgcagaattctttcggagatgctgttgcccaattcattgacaaggatgataagcatgcaatggagatgttcgtcaatgaatccctcgagagccaggtcaaacacctgttggccttggatcgtgaggaggacgagatggatgacgaggagagagaacaaagctcgctagtgactgctatggagaaatatcgcagtcagatggaaaccatgttttcaaagggcgtgaaaaagcgaactcgcggaaagaagcgcttcaagcccaagccagatggttgggattccgagtttgatggcgtgtgggaagaccagcctggtgcacttattcattctgacaacgaaggcggggatccagcagaggaagaggctggagaagatgggacagtgcccgctcgtggtcgtgccgcggctcccactcggggtcgtggtaggggtcgtggtcgaggtgcagcggccagtgcgcgaaccaccaagaccaaagctattccagaaaaaacgaccacgaagggtcgcagaaggcaagccatctcagacgaagaatcagacgtgattatgctggatgatgatgacgacgatgttatagccgatgtcatttccgatgatgatgatgatgattcgcaggcactgttcgttaagcagcctcgatctactactaccgcgaagccacggaaagctgcccctgcgaaaactacgacccagcgtcgcggtggacatgctgctgcctcgccagctccgtcatcggttaccgttggcgggactgcttctcggcgagcccctgcgcgtggtaagacagctcagtctacgctcaacttctccgcttcccaggccagcgcacctcagtcatcacgacctagccgctccacccgtaacatgagtgtcatcagcgatggtattgatgacgatgacgatgacgatgacgcctttgaagaaatgccgaccaactcgaggcgtcttaagtaatttgcgatttaccgccatggatgtttcctttatgcatgtatggagttatcaagaatcactcgagcgttaccatcagcgttgttgccttcaatccttcaatgatatcctcaaaatacggttctcaaatgtcagatgatacaataaattataatcaatcaacaagagacagtacttgaagttgtgacctttggagatgaagtataccgacaagctagtctcaacacggtaattagcttaaatcgcaggaacttgggctcttgtccctaccgctcagacccagaggcttcgataagccaatgaccgaacgagatcacttttggggggcagaatgtgattcagattcccccttacttcgtcaaacacaccagagacaacgtagatctctttgtcatttgttctatcaaccccgcattcccagccgaggggcacaaccacctcggtgcaacacaagctcaatcctctattgcatcatatattatcctacctctgtgttcaaggatacaagacaatactggttaacgcacaatggcatacaaaggtcgacccgttcgcattgcaggttagtttacttgcactcatgatgtactccagctaacctgttaggtgcctcgggctctgcctcagaccggcggcaagctatcgctgattttgcacgtcaccacccgaccgatcctatcgatgtcatcattgccgatttcatgagcgagttcaacatggccactgccgccggtcggcgtgtggaccagacgacttcccgagtaccaacagccccggcctacgagccctcttttctagaagcacttgagccggctctggatgatctggccaagtatggaatcaagctcgcggtcaatgctggagtgactgacacgaagggtctctacgaggtggtgctgcgtatggttgaggcaaagaatctggacttgaaggtcagtcggcgccttacccaaaattaatcaacaattgctgatttgggtgtgcaggttgcatgggtttccggagatgaagtactatctaccgtccagaaggaattggcttccgggtctgagtttcgcaacgtctacacaggcgatcgattggcagattggccattcgagccaatatatgcccagtgctatcttggcggcctcgggatcgcgggtgcgctcgcaggtggtgcggacattgtattatgtgggcgggtctcggatgcttcacctgttatcggagctgcttactggtatcatggctggcagcgtgacgagcttgacaaactggcgaatgcgttcgtggcaggccatctgattgagtgcagcaattatgtctgcggtggcaatttcacaggcttcaaagccctagaatacgcagacggggatggctggaccaatatcggatatcccatcgccgagatatctgccgaaggtgacgttgtgatcaccaagcaggcgcatgccaccggtggtgcggtaaccgtcgatacttgtacatcccaattgctctatgagatacaaggaccttggtactacaactctgatgtcactgcggtcctcgataatatacgctttttgcagtgcggcgtcaatcgtgtcgctgttcatggggtccattgcggccctcctccgcccaccaccaaggttggcatcactgcgcgaggagggttccaggctgaggtatggtggtttctcaccggtctggatatcgaagccaaagctcgcatgctggaggcacaagtccggcacttgttgtcaccctattcgggcagatatacgtcactcaatttcgatttactgggctcttccctctccgacccacccaaccagaaccgcgctaccgtgccgttgcgcatcgtcgcacaggcacgacatgcagaggaccttgcaccgacacgcttcctcaaacatatcaccgataacatcatgcagggctatcctggtgctacctttcacttagatatgcgccaaggattcccacgtgccattttcgagtactatgtcaccttgctgccacaatcagcagtccaacaccgcgtccatatgccctggaagccgacggcatctgcgcagaccctggatatttcgcctccggcaaacactaggatatatccatcacgccaaccctcgcagccgaccgcgcgcaccgacagacccgtcgaccttgcccgagactttgagccgacgagtcgcggcccgctaggctggatcgttcatgcacgctctggagataagggtaccgacgctaactgcggcttctgggtgcgtcacagtgacgaatacgaatggctgcaggcgttgctgtctgttgataaggtgcaagagctgttaggagagactgcccgcgagaacacgaacttggagattgagcgcttcgagctacctcgtcttcatgccgtgcatttcctgtttcgcaatctactagaccggggcgttggtgtgaccaccaccgtcgatttcctgggaaagaatgtggcggaatatctgcgggctaggcatgttgatctccctgtgcgattcttgaaccgcggaaagctatagaatggagttcgctgtctcattcacgggcgactaagtatgccaccggggcataaccatcgttggttaatattgccgatccatgaccaggagacttggatttacataggataaaggcgctatcccatcgtgtacggagtatcttcggggacaccgaaggacagataacatagtggaaatcaaattgatcaataaatactcaagaatgagaacaaatatccccaaacaccgtgctatcaattgcttctgtcaaactaggtagtagggaggtcttaatccagatcagatgcagttgaacactggggttcatctatatcattgaggtcttgatgctgggaaggccctagaaagaataatccagccagacagagcccagaaaatgcggccaagccatagtatgggagcccaaaccaaatccctctgagcttcataccctgcgaaaaaagctatgccaatgtcgacccggcaaacatagacccgaatgtttcagagatcccaatcatcgcattcatcttcgacttatcatgtgctcccatgtagctcatagctattgatcgacatatcgcattcaagcccgcgcctgatgtctgaagtattaatccgaaaatcacaaggccaatgcgcggagcccctgtaagaaaactcccaaaaatcaccaagcaagccgaggcgcgtccaagaattgacagctggccgcaagtattttgaaagtagctttgatatcccagggaataagacaagtaaaatgagcgaacttgaatcatcgcacttcctcccgacaagaagaagatacataaggataagagaaaagccgcaaggcgcggtttctggacaggtgacggagtgaagctggactccaacagcggggcgttctcgttccccctgtcatgattctctatacgcatggtttatcgaaataaaagaaagccaccaagtggctatgaaaattcaatttgaaaggtttggaaaaggtaagtacaacattttggaaactgttgccattgaaggggcgacagggccttggcgatgacaactttcgcgtttcaaattacgacattgcgataaagaagcacccagaccagagcactatgttgtagattttagtcctaattagagatatcatctattctgctgtctcaaagactcatttgactgcaaggctccccgggtattttgtaacctctggcgtcggatttgttagttatgagagccttaggttgagtctaactgcatcgacgagggtcctttaccactcaaagtaactaacagaggaccatacaccttttaagttgaatgacaagacgttttagccatcttagctatctgcgaactttttctacgacatccaaatatatatatccacgcgatatgacctcctctccgccccttaaactgagtaagttgcgagattattggaacatacacgatacatgcagatgcacctctgtcttgctaggaagcaaatcaatcgtctttttggatgttgcatctcaccagtcaatttcagtctccgcccctgagggccgattgtaacgcgggacccacaagggccgccgcgggccggggacccgcattttggatccgctatctggtatgtacattgtacagtgtacaatgtgcagtaacatcgtacaagaacatgtagagatctcgggagatggcagatcaggtgatctctgaatggtacagttgcaagtcatgtgatcagtattgagaatactgttactatagtaatttacataagctggttgaaggcctaaagtagtttagcagggattgtgtaaaggttgtgtaacccttctctttccctatcacctacacccacttggcatctgctttaccacgaaggaaacgctatttcgtatcaatcgaagatgtcagagagtgcatcagcgaatgtgaaaactagattcctggttttttccgacacacatgggcttgatactccaccaaactttgtctcgcgccattatgcggatgtcgcaattcactgcggagatctcactaccgaatcgaaaatcgatgagtacaaagcttcgatccgtttcctccaagccgtgaacgccccgcttaaacttgtgatcgccggtaatcatgacttcactctggacactccaatgttccagaaaaaggtcgtggaagcccaacccttagatcctcaactagttcaaaaagtctacggcaactatgaagaagctcgagggttattcgagaaagaaacaggtatcacttttctagatgaaggtatccattcctttcgcttacaaaatggtgctctattgaatgtttatgctagcccgtacaccccatcacttggggattgggggtttcaatatcaccccgagcgcggacatgactttcgaattgagaatgtcgatgtcgtgatgacacatgggccgccaaagggaattatggattacacacactctggccagcgtgccggctgcccacatcttttcaaggctgtagctcgagcccagcctcgacccctgatgcattgttttggtcatatccacgaaggatggggtgccaagattgttcgatggcgtcagaaagttagcctggaaccttctcacttgactgatatcgacaacgaaaagtcagtcctcgtatcccgactctctaccatcaagggtaaagggaaccccacagagtgctctactacaagtaattgctctgaggatcacaatccactgcaacggggctctgaaacactttttatcaacgccgcgattgagggctacgaagatccttcgatacagccaccgtggcttgtcgagctcgagcttccagcagcggcgtgagaacctaaacttaccgtcgcgcttgtagtaatgaattaggcagtgttcttggttcttgtcatgttctattcacaatttgtgctaggtatatggttaatgtcatcgcatggtaagtaattttcactagcccaagggcaattgctccatctaagaatacatttacaaaataatcgacctcccgtcctcctcctgtaataatgagtataataataggcaatccacaacccctaggcgtctcccagctccgcgcatatactctagttcttcgacattgagcctggaaggattttccctgcctttaccaacaccgacaacagccatcgaaagtctgcaacctcaccatcactcccacgttcagccaccgtcacggccctcaatctcagcaagtccgacatggatgcaacagagccctcgaaaaagggatctgccacgtggatgcgttcgatggcgtcttcgatttcgataatgtcgattcggacgcgtattccttgactatcatcgaatataatcttgccgtcgggctcgagagaaaagttgggggcaccgtccatcactctcttagcgatgtcatgaatgacatcgctcggtgcagcaacatccacatcctctgtatagaatacagggtcgtgggcaatgctggcagcgccgccaactagaatgagttgacgacgaagttcaggacggactaggcgggtggctgctcggaagcactcgatgagtgcctctcgtagtggtgcagggatgggggtgcacttcggcatgtttcgaagttacggggcaaaggcagctgggcagggcctctgaatacatttagcacatccattctgttgccacatactgcgcctgcgaagtgatgagcttactggagtatatgcagcggggagctgggaggcccgggggtacagtggattgccttcacctccatgtcagtagaagctcacattgtagtctgatgctcaaactcacggccaaaagatgatatatccaataagcatgtatctatacaatgtccgactttgtggatgtgtataatggcgattatttgataatacaacaagcttgcagcgccaaatactcattttgaccgcagtacttgccattctcacctcattcccagttgtgcctttcttttccctcacttcacataatctttacttgctgcggttaccacctgccttcaccgagcttttgggatgcagtagcttttcaagattaaggaaagagctacgcacattcaccgaaaccgcatactgacatacatgtaaacacaagcagtcaattccaaccactagctatgaacaccaccgagccacagccagcttttcctcttgcttattgcaggtgcttttgcattatcaacgagagcttctgctccgttcctccaatgatatcgaaataactatattgtaccgattgcttaatcaatgggtgtgctccgaattcgccgagaactcaatgaaacaaaacaatacccaatcagcaccatatggcggctagtctatgcatttagaacagagcatcgtgatgaaattataataacaaagtccgtaatatcattttatagaaagactcggtatccagactacgcgctgtatccctagtagtcgccatgcactgcgatatacgggctccgagtatctctgttcgacagtctatcataacaaaatatgctttacgggttaatctcgaaaaagtggagttaccacggataattgatggataattgcattgaacactatgcctttgaaatggcaataggcaagaaaagaaaagccggagatcgctcagggagctagggcagtagccttgatgcgagcctcaaagcaaaatccaaaaggatctcagtacccaccagccagagaaccacccagctttatccgtttcacaacagtctattagattgcaagccgctccaccttggctctaaggtattcgatctgtggagctaggtcaccagcatcgttcgaggtgatggtagccgcgataatcggccgggtcacgccgcatgctcgaccaagagcgtgcttgttaggcagaaaaacgtacgggacgttcttgtcttcgcaaagcacagggacatgcatcaatatcgcgagaggatcggtgtcggcggcgagaacgactatttcagatgtgcctcgactcagggacttcgtgactagacaggcaggcaggcattagctccatagttagctcaaagtattgtgaattgtgaacagacataccttcatttgcgccttttttgacctgcttgtattgcatgccttgctgcaacaagtccaagagttcctgtgtcaaagcaggatccgcgaccggccacgctgggaattggttggattggagaatcaaaatgaaaaacccgacgcagacttacggacacactgtggggacgattccatttttctagagggtcgctgtgcacctcagaaggggagtgagagacaggaaagccaatctcgttggggagattggttggcgaagttggaaacaatgttgagaaagtgagtcgtttgcagagcaagtaggtagagcgcggtatgaaactgcgaagagaagagacgaaagagagggagagacaccacctatgagcactttccttaaacgaaagattgtcggccacgtcaatagatcattatactgtacatcattacccagacatcttgagactcgaatatcaccgaagttatacacggaaaaagagttaactggttatatttttcatggattgaacttgaaaccaaagatctttatatgaattcaatgttcttctaaacataatgacaacgctatgcaaacaacgctctgaaacgaacattggaagtctctatacacttacactggtcatggtagccgagggtaagagaggacgcagaaaggctactgcatcaaatattcacattcctatccgctcacgagaggatcaggcgtaatgttggtggcagtgatagcagcagcctcggctggcgtgatggtgccctcagagggagtatcagtctctttgggcgtattattctctacgttctcattcttaacgggaggctttgtgcccttttcacgcatcgctccactttcaaatgcttcttcgggcagaggacggacatggggctgacagatccaccaaggccttccgtactccgcaatcactgctttagatcccttcaaagtctcatcgggttgtgcttcaaacttctcgggagaggcttcgtactcctgaagtccacctttaatggcctcttcgaggagggccaaggtgtgctcaaaagcggccatgtcgcctggtttcgatgtcgcaagagcatcccgaacgttggtatgggttccaaccattggccgcaagacttggaagagatgaccctgcatgaaaccgaggctggcagagtgacacttcttgcccttctcggccttactccgcttttgctttttcttgagcgggccctcctcgtggccgttattttcggcatcattgatttctgcaaactcatcaactgggtcggatggaagataaagtggcttcctttctggaaccggctgttcgagaacgtatttatagatgatatcaaggtatcttcgcagcacggcgtcaactcggtaaccgccctttccatcccgcccgcgccagtattctctcccttcagtgccggctgggggtggcttgctgaatatggacgggtctgataggtttccttcggcgctcatcacagcgtcggcaccggtcgcctcgagacaggtttcgatgtcaccgtagttaagaatgtttccattggcaaaaattaccgtatccgctggtagattgtctcgtaaatagcggatatagctccagtctgcaactcctgtattgtgacccttttgttcccgtctgcgtccatgcacagtgatgatgctggccccagcggagagaatcatcttagcatactccaaggtcttctccttggtctcctggatacggaatttcaccgtgacaggaatcgggagttcagtgtgcaaccgatgcacaagcttatagatcaagtcccagtcctcctggaggaaagctccgtagtgtccctttttcgcgataccctgcgggcagccaaggttcaagtccacggcgtcgcaatgaggtgccacatgacgggcagcctccaagaactcatctgggttgtttgtgcaaaattgaacgaaaagtggccggtcaattgcgggatttccgtcaagaaacaattcatccttgttctctcctttgcgggtaggttggaaatgtttggcccggacgttctcttgttcgccgaaaagacgtgcgtgaaacattggggtgtatgcgagtaacggtttcgggtcgtttggtggcatgaatgatcgagtaagcatgcgccacgcctttgggaagcattaacgtcggtctgcagatgttgctacttggaaggcggactcacgaattcggatctgtcgaccattggagcaacaacatattttgggctgccaatgctttcataaaacttccttccaaagagcttctccttaggctcacgcgcagccgcagagggctgctcaatgctctttggtgggcttgtttcggaggccatttttgagagattggactgggaaaaatgtctagaaaatcggcccaccaaagagttgaaaggcttgaagatacctatgttgatgcctggaaggaggaaaatgtggttatggtcaacgatcgcctccagtcgcatcacaatggagaaacaacttttgcgaaaagcgccgtatctcagccggaattactatttcccggcttatcttatcgtcgcgggggcgattggaagctgcgaacgcgttgagcttgtggtgtcactggggaaattgactttacatctgatgttttcgacagtaccttggcatattcctttccttctcatacgcctcacaagcaacctgatcaacctcaactgcctaggtgatcccttcaagatcggactcgcttgtggattacataatctgatatgaataccccggcgccagccagagactaaccaaggaagtctcgaagtcttttagtgagaacgggaaccgaaaaatatacattttttgatgcatatatgcgatgctgtgtgaaagggaattaatattgtgaagcgagtgtgttgatacacggaatttgacatagttctttcttgatcgctcactgttctgatctctcgcctgccaacaatggacgcgtcaacaggatcaggaggtaagtccatagtccacataatcttctgtccaagtaactctgacagcgtgctaggtcctctaaatctctgcttgtctgaagatggactatatgccgcccacgtgagtggaaagggcctgattgttcactctgatgtagcttcggaaaataaggaagtgcagatcgcaaggatcaaagagattccacttaaatcacttaaatacttcaacgtggaaagttctcgaacatcagatgatgaggttgtctctcgacgactcctgtctgcaaacgacaacagaatctcggtctggcagttcaccccccttgaaatattggccgagattgaaaacatcgaaccgggctcattagctgttgattttggcgctgatgagaatgaagttctggtgtttcatgcgtggaacactaaactcagtgtccattcattagagaccgggcgcagctcagtcattaaaacaccaaaattcgcccatcacctcggttttggttatcgcccaagaactaggcacctcgccattctgttaaaaccggagacttcagatctactgaccgtccacgagccccggtcctacgagctcgtcaacaggaccgtgctttcaaccattgatgcgcaagggttgaaatggagccccgatgggaaatggattgccatctgggatatcgctagtgcaggcacaaaggtactggtattcacagcggacggtcagcttttcagaacgtattccggaccatctggggtggacgattccttcgatctcggagtaaaacagattgaatggagcccggctcccaataagggcgtttctggaatattggccgtgggaaaggtcaatgggaatattgacttactccggactcgcacagtaagttgttttccaaatatgtgcggcattatttgctaatcctattgtggcagttctcctccgcaacaacactctctcatgtcttccaaactgaccagcaatgtctcaatatctggcgtgagcgatacaccagtgccgcaggggacgctgaatatgccgaggcatcctgctcatctgcattgagcatgagccccgagtcggcagggccaccacggggcgtcttgacaatgaccttcagcccagacggccatctccttgcgactgttgacactgcacggcagaatgtcgtttggatttggtcactagagggcaccccgacacttgtatcagctctcgttcatgaacaacccgttcgacagattgtatggcacccttcgacaccacaactcttgattaacactattacgaatacattgcctgctattcgatggtggtctccaagcggtcatccattgattgcccgggttcctatccagaggaacgagagtggaaaatatgatgtgagatgggttgcagggacaaatccaaagtcgccgttctggttcagctcaccagaacaacatgttattggatatttgtctacccttgacggtgctgttgaatttgaggtgttgaactcggtgagcagcaaaagtttgtcatgattgagaatgagtgtgtattcgagaggaaaaggggctctcaataagtcaagtgcctctaatcactggaatgaactggttatcggacttgatagtatagaactcacattcggtgctgtcacttagatctgtgatcaaacagaacataggataataccgaggccgcgactttgttataccaagacatagcataaacatggggattctgaggttatatagcctggtcaatcgctagacaaatagaggaccttgtcctgaaaggaactaaataactatttgcactatctagctgtttcacttggtcatggtgcaataccttgtcgtctgagcaatgggcgaaaaatgaagcatatgatttactctggctaacaagtcgacaagttaaaaaaatataacaaaatcaaaagtaaaactccgatagggggaatcgaacccccggctgccgtgtgagagacggcgatgttagccactacaccatatcggatgaggactgcgaattactctcttaggtttagctttgaccttttgggtttagctttgaccttttgggtttagcgctctttgtccgtgtgcgttcccgtgcgtggttctataaagtcctccctatcgccccttcaacttttcgctgtatttctcccgcccgctttttctttctcctcgtcttcgtccgtgctctgcaggtgaggcatttctgctattgatccggatcactgagctcctaacctccgctacccccttatccctcgacttgactcatcggctattctgcgctcgtacgaatgcaatctacgttgcccgccctgtctttctcagctccgaccggtacgctcaagataagaccgcctttacccttatggcgcgacgccgaccggcagacaccgaccggcaggcttaccgcccgggatatcaatcggctgtaattggcttctgtgtaagcaagcgcagtcgccttaactatattcttctataaaagcgtcgcaagactgaacttcgggccaaaacgttcggcagcaagttttttatgattgtggaagcacttttccattattacggtcatcgctagtgaggtctgctgccgatagcgcctagatatcgccttaatgcagttgcccctcagagctctcctacagttcccgatcatctgttgataatatcgtcctgtatcgcgaaatggcaccgaccacgagatcagcggctaggaaggcttttactacgtcgaccttgactcctccagccttgaaaatatcagaggttctagaaatgattctgcttcagataaatatacgtactcttctgacatcttacctacgccgctgggatatgcagtcaacattgggtgggcttcgagtcatctcccgaactagttgtagctttttaaagacacatattagcttgcttaaagacaacagcttcacaaagacaccagcaaccaaggaaaactataagcgagaacatgcacgaaaatcaaggatcatcgaaggtgatcgaattcttcgaatttattcgctcgtcatgctttttttctcaggccaattcatttacaggttcaaacaccatatatggaacctcacgacttccctagaggacctccgagttgcgggtattggtattagctaagaaataacacacattccattctacgagagcttggctatatctgccatagaccagagtgaattcagacgttgggcgactgatggggatgccagaatccgacccgaatcttgttcatttcattcgaatgcaacaggaaatatgcattgtgcgacaaataaggattctcgaggcccaataaccaaatgataaacttaatgaggcccatgtcgtactcatcttggtttgttcgtttcagttttcgttgagctctaacgctcaccatttatcccggcgtacccttgtcatgttcgcagtacattagcaaaatatttctatataatgaatcgtcggacttggatttctatctcctctatttgagaaaccgaatctcattcctatactgcaagtggtccatttatctttttattttctagggaatgtcgcctgattaggtgctttcccagaggccctggcgttagcccccgagttttcagtccctatataatcaactgtccgtcggtcgttcgtaatccgttatcgatgtgcctcccgctctctttatatagtcacctacgcgagagggtctacgaaccgtaaaatacaaagaatggtctgatagggccttgctatggttgagtgatagcgcctgctttgtttacgctatgaccggaatataacgtggcttatttgaccaatcgaactgccctagccgcgagccagaggatgctaagtccgcaaacattgcggcacgaacggctagcccctaatttcgtgatgtcctcatagtacgagctcataggcccagattgcaaatgcgataccgtccatccctcctccaattcttccggcattatgaaaactgctttgccgcggaatattgcttgttggaggccaaaacaacggtatatttcagcttgaacatttcggctgtgcacggttagcactcaggtcgtgctcactaatcacgcaggcggatatccatagataacgactattcctgcaaccgcacaaaacgtgctccgctgccagcttacttcgttgcccagtcacggaaacccctgcatatgtgactgatgcatagtgtggatgatgcctagcctggcgctaatgcaaagtatacacatgtgatggattagtctctgtggcttgagttttataatctacctgtttattcacaatataatttacagcgtatcgagaaatatatttttatcgcatatatagtgaagcggatactgcaaccttagaatactctatacctcgttccctagctttcaagtccaactgctatacaccttcgtaccaactgccaccttatatctgatctctcttcacctgcgcatccatagctggcttatggtgttgctttcaggggggtactaggaagatgccataattttcatacttcaatgttctgatgctcggtatcttgagttattttactaaggtatctagagctttgactccttctatggttctttggataacaaatacagcgtttaattgagtgaatggctctgtctcaagatagtaacttcagaatttcgggcctccatatagggcagcaaaaagaaaagcaagggcaaaggtccagcttcacaaaaactcaattcagtccataaaggccggctcgtctaagtctgagtcagaggcctcctcctcctcttcatcattatcacctggaggttctttgattgacacaatcatggcctgataaatatcctctgccacaatgatcccgctcgtagcctcatcagtcccaggagtgctttcgaaatcctcaaaggttctttcctgcaccaaacagtctggtagcttgtggccggagatacttctcgatgatatctttaacatagacttgcagagatattcgccgggtgttggccagaatagtctgatgttttcaactttttcggtaaagttgagattgccttccttcttgcagtgtatgtaggtaataatgaatcgaaaatataagtacctcttagctggccgtgcatcgctaagaaactttaattctcttccgtccaggtcctagagagaggttagctaattgcccaggctcattgaaagaaatattagcttacattccatgtagtgcatgtcgccttggtgctgtcttcggttggaaagcgcttcataactgttgtgtgtcgcattgcttcgtgggctaacacacacttccaacgcgaaggtgtcgtgacatcctcgtcttcgaggataggcacgatgactatcttgccgctatcaagggcttcttcgaccttgtagtgaagtgacagggctggatattaggttagtggtagaatcattatcgcggggggcacaaactcaccattcctcggatcagaagatacaatggcccccaccccaaataggtgagcaatctcatctcctcgaaggctctttggcacaaggtgggctgctttgatcgatttggcatcagtggatccaatcacgtggcagtgtccctcaaattcatccttagggatatcataatataaacaaacgtctctcttgaagttagaggcattgaagcttcgcccatactcatccctctctttcggtaccttcgcgccggcggacatcacctttgggcaaatagttgcggtatatgctctttccagaaattcgacgtcaagttctccttgtcgctgacgcttcacgggcggtagctcttcgagatcatcttgtatggctttgcgttgattcgaaaggaacttcaagtgatcagaagtacgtcgggcggatgtcatgagtggttttaacgcggtgataaattccgaggtggttatcttttcattgtcgaggacttcaagaagaccatcgtgagcacaagagatgtaatcgagatccattcggtagtctcgaatcttgccctccaggaactcggacacagatcttgtggtcgtcatctctctcgcctgcttcctgagaagagcccgctggcgatccagtggcataatagcgaatgcgttacgagggatatctggccgacggaacattttgctgtgtgatgagattcggtgaaactccagaggatgtattggaaccgaagcccaaagagaaagggctgagatagagatgaaattcaaactccaaaggaggttgaataagcgaaccgaggattggatccgaactccaaagagaacgggtgaccgaagtcgaaatagagaaccaatccctaaaggagaatggacaggtgaaccacggattcaagccgatttctaaaggaaaacgagagacagggattgaaacgagaccgatctctaaaggagaacgggaagaagagccaaggatcgaagccgatcttcaaagcagaacggggggcaaagatctaccgtcgctttcagtgttcagggcaaacggcagacggggcttgatgattatgcagttgatagattgtgcggatgaggatttgcttgaaggaaaagtcattcaggggggaagttgacgggtctcatctactcaaaggcggaaggaaccagactgatggtaatccacggtatgtaccttaggtaggtactgtaatagggaaaccgcgccacatcctgatgtgcgccaaaatgtccagaatggtagatttagcccccgatcacatagcatagagcatcaagcgtcctacatctctctcaaaaggattgtctatttcctattccggtcgtacaggggccctgtgtccttcctcatactccccgtcgtgcactgaacatccccgtcgtcttgtctgcgatgtcagaccgccgtcgcgctcttcctacttcactaggtaggtctcggcattcacgatttcccgaacgtttcctggcaaatagaaagtgatcatacttcgacatcgacagatgttctactccgcggctggttcttacggttggaaatctctatctcatacaagtggatctttcctccggcgtgcagcttatcagattatcatcagattatcatagtataccagaatcaagcaaaggaatgaaattaggtatataagaatattctctaaagagcggcaacccctccccccccaaaaaaagaaaacacaatagtacacaagaaaagcaaatattctgtcttcagtatgaggcagattctgtggtgctggaccttttctggggagaaagcgatttgtgggctcggcgaccaaccgacctcaaccattcacgccctctacgttggacctctgggctggcaaaaacgcgctgctggtggaaggcctgggcattttgcatgaactcttggatggcattgatgataccattggtctcatgctcgggcttattggcctccagcaacgctgctaccaaatacttgaaagggcgcatgaagggcgggccctgatcggataggcgggagaaattgaaacagaggttgaatggcaaggctactgccaaccatcgttggtcgaactcggactctgacatcgaggtcttcacctgaaattcaaccccctaggactgccaatcctatatgatgcacatctcgtttctgggcatcggaagctcatatatcgcaataagaaaatcggcgaggagtgccgcctcctacctgaaacgaatcatggagtagatcttagcctcggactcggggaatatgcctaactggtagaatctgaaaagagtacctccctaagccacctctcggcctcgattccaatcccctcgataagtggcatggaacatcctcgccatctccttgattctgtactgcgcaatgagagcggttatgttctcgatgatctcgctgttcctagttgtgcggactccgccgactttgtttgggtcgctgactgtgaatgtggcatttccgggatcttggtttcgaagtgcgcgtatatcttccggcccagtgtacggatagggcttcatttgtttccaccgacactcaaagtgggctagcgggatgccggttcggcccgtccatgagtattcccatctatcatcctgggcactgaatgtgaaacactgcctgttgcctagccgtgtcacgctattttggcatgtatccaggacagattggcagaatgagttatagcttagggtttgctgatcattcggctcctcgggttgtaaactcagctggtcactagaattgctagattctcgagcatctaacagaggactcgtagcactcgaaagggtctggaacagggtgctcgcaaaaattgacccacaagtccgaccgacacttagtgaagcaccccacgcattagaaagtcctttgtgaagttcttcgtccggattagtatggagcccaccagctgctgtcatgctagtaatgtttaattccggagtcgtagcccatcctcccgagtaataagcggtagtaaccagggtaacgcgggcaccgggttcaaggacggctttcagggcgaggatactgagtccctttgattcattgctatcgttcaaacagaggtggtaattggggagtacgtgacaaaatatgaggaggagtggggcgtcggttcgtttagctaagtcggaggctagcattgcctccagaaggaaacggtcaatcatttcattcgaccgaacgacagtcacaggggtcagttgatcttgatccagtatgtcacgatcaaggcaagttttgcgctcctcgtaaggattgctatgtagatatggcccatatttctggatcagcgcttgtcagccacgtctgcttctggccttgacctttgaggagatagttgaaggtgtagaagtcggagataaaccacccgtctcgcaatgggtgggcactgttgatagaagggtgcgttgcggcgaggatgatggtgttctcgtaaacacaaggtaccgttgaagaggtgaatgtttcaggcaggtcacttggggatcgcatatgtcctcctttgacgaggggctgttgctgtgttgagcctgccattgtaaagtgatgtcgaaagatatgcctatggtgaagttaggatcttatcactgagggtttcaaatacccaaattctagcatagcactagccacatcggggctttacttacttttcgagttctaccacccaagtaagaacgggcggcaaccagggaagaaaaccggactccaaaggagaacggcggtagacagggattgagatcgtcaaggagaagaaagactcggcaccatcgatagcttaggtcagctactcctgttggaagtaaaaatacgttataatacaccgtacttagcttagctaagaaggtgtgcacctttttggcgtagcggtcaagtacaggcgttttgttacgttgacaactctagcactggacgtccaccttttttgggacaggaacgataccggttgccactctgcattgaatcctttaaggcttgaagctcttggatcctttggtcatgcccatgaactaccgcgattgccgattcccgcgctaggatctcctgctcgagtgcctcctcgatctcgcagagggtactgggtggtgtgagatcaattgattggctcactgcggtatagctcgaagggggtcgggtcgtgaaactgcatttttttttccttttccctaatggcaattggtacaacccggtatcgagtggtgtagcccgacggcaacgacataggaagtgaaaggcccttgtaatagttcacacgaatcacattccacgttaacaggaatttgagtccccgttgactggaccgccgaaagcttcaattttggcagtcttggtcccgactgtatagtagaagtctgctctgcgtacgtacccctggttcatggtaaggtatgcggctctgtagtgtgtggagcagagtgtctaattattgacgaacctgtctcccacgagtctattggtgctgtagcgcagttcgcgcctaatatgcaggctggtcctggtcatctgtgattagcggggctgggtgtgtgttgggaaatgactccatttggaagggcgaagagtattctttgcggtccggctggataagtgagtaactaaacgcaaatggagatggtgaagaaaggtgtcatgtgtattgaagatcatgtggattgaagagtccaggggaacctcagcaaccttgatcatttcagaacttccgtcacatttcctctcttctcttcccctcttgtctcctagcatccttcaccatcccatccgcagcttttcatccactatccgttggtttttcatcaataattcgtcgccaacctctcttatcctgcaaagtctattggccttttggtctttggttctcctattatagccatatcagcatcatccccgcccgcgagtcaagacatattcaagtgcgatcggatactggaacccgcataagattcatagtgactatccagataacccttgacaaacgggccaatggctaatacgatacaagtttcaaggttcccctgccaagatggcgggacactacactgtaggcgcgccgatgaatgtcctatctgccgaagccggagcataactcattgagcctggtgtatgggcaacatacgcaaagcagcttccctggaaggtggcacggaccggtcaactcctcaaaacgacgcggtcaaattcctcaagaacgcagacaatctccacgagcctatgcaacgttccacgaccaattatacgggtaaacggttggacgagaggatcagttctgaatcctcgaaccttgagtcggtcttggtacagatcgtcggcaccttatctcccccatgaatgccagtcctgtctgaagcgtcacgggccatggggctcactgtatccggtacatggacgccgaggacagaatagggacggtatgtggaaaatgtcagtggaactgtaaagattgtcgatgcaagtcctcccagccccctctcggaggcgagatgtcacaaaaagttcaccgacgaggacgttcctctacatcttccctgggctcgcgacttggcatctcaattcacagcgcgttgttggcgacggaacggaacatcgcattggtgggactccaacacgcaggctgtgcagaacacttgttttggtgtaattcagactttgaagtagcgggaggagtgctttccgcacggcctcaaaggagataatgactggcatgatgccctgccgtcgtagctgtttggaaactagggacatgtgaatgtgtccacggtagcgagttcttctttctcactccatgtatgatgtcccttccttgatggaactatcaatgtgacccattggattgagtttgtaaattaacagagaagataacgaggaaggagcaaaacaagacgtatgataaagaggaggataggagggatggcaggaaagggattaggaaacagattaagaaagaggactagcaagagagactaagagggcaggtgctctctgtgttctcagattgcacctcaagtctgatatcaagtcttcatacgaccgagaactatgcgatgagacgaaagtatgtctaaaacaaagcatgttttaagcttgaatgtcgaggacttgattgagagtaccgagaaccaggagagtgagagctagatataccgtatatacatactacttctagattctgagtacgggctcactcccactcacgacaaccgacgtggaaaatatcatgtctgattagagcatctgatcaaccaaatcaaagaagagagagagaattctggccactctgacgaggcaacgcccatcatctttgaaatacttcagaggtcgttctgacgaagaaagcaaacatgaagggggataagactagaactcttcaatgggctaggttggtcctcgaatataggcccagagcccaactgtcaatgggcttcgggctattttatccatagccagcccagcccgccgcccattgtcaggaacgtctgacatgtgcaaggtcaggtgtagggcagggcagagggacacatagtgcaggtgcagctgcagctgctatacttctcactgctcttcctttcttctcttcttcttcttccttctctagcttagtgttttcgtataaagaacacaaagttcctttttttctatgattgttttgccgagtctaacatcatgttttgctctctttaattttattagctgaaatgctgtgtagacatagatactactgtttatatctctagtattagcctgaactacaaattagaatcaagaaagaagaccctgaattacaaactattataaataattaaagacagacttcgaattctactaatagtataagagtagacctcgacaagtcccatgggactaaaaagattttggtcccaactcctggaccgtgctatatggaaagaccacgattttaatgcttaaaaccacatgaaatcatggcatttccgttgtcaccttgacttacaccatatcggatattggatgaaggaagatatattattggctatatgaaccagcgacggaatagcttcatttttgaactggtctataattcaggcatattaaggcatcaacctgaaaaaccagacatttaccctcggccgctctgccccttcgtagttgaatagatatttgactatcgcgattttattttcgttttcaattttagaattagtgagtttcgattatttgtggggttataccatgtttatgcgatccattacgttgatcttccgtcatccatgttgttggtataaacaggatctcacatcatgccaagattcatacaatataactgtacaaggactccggaatagtgatgtttgaaacttgattcctcggcctagtccggtcattatcagtcagaatgatgatcccgtcatacttctggatttagctttactttatacgcttgtgtgtatatccaaccatataccgataggttttttacgacaaagtaattgaataataatttacaggaccaatcctaatgatcctacgatataagcgacagagacattattattttgctgagcgaagtaaacgcgcttgaccatctcttcagtgcttaggtatcactgtcggggttcttacatcatcgagccctgggaacaagattcggagcatgatttgaaagagagggcagttttagaacgaatattcaatattttccggtttcctggcatggataaacgtcacattgaccggatcgaaatttcatagtctattttataaactcagccgccaatctgaccttcagtttgatctattttctctccacctcccacctctcaatcactgggatattaataacattgcgacctataacaacacgtgaaacacgactttccagcatgcaacaggaagtggaaaagccctctcggggccctcaatctcaattccaaaagggtaagctcatttacaattctgtctcattgtttcgggcttaacaaggaattcaggtcaccaaatccctattgagcaccacaaaaagcccggcttacaggctgagatggaagacccaaatcccacctcaagccaacttccaaccgaggatggcgggtatcagacctacaaagccgcggggaagcttgccggaaaaaaagccattatcacaggtggtgattcaggcatcggtcgtgcagttgctattctattcgctatggagggagcctcgagtctaatcacttaccttcccgaggaagaaagagacgcacaggagactaaaaagcgagtagaggaaattgggcaaagctgttattgctaccccactgaccttcgggataagaagaattgccaagcagtggttgacacagcccttaaaagcttaggtggtatcgacatcctggttaacaacgctgggactcaaacgatgatcgacgatatcaaggatctagaagagcatgtatcttccgtcttatatcattaagtgtttttactaacatacgttcacaggtctcaatgggaaaccaccttcgacaccaatatccaccccgtcttctatctttcgaaatatacaattcctcatctgaaaagcggctcgaccataatcaactgtgcatcggttaaccactacattggtcgccctgatctactcgactacacgtcaacaaagggcgcaatcgtcgctttcactaggggtttatccaaccagcaagtcaaaaacggcattcgggtgaattgcgtgtgtcctgggccaggtaaatcgaatctcccacagaaatatttccgcaacagctaatctgggtatagtttggacacctcttattccagcaactatgactaccgccgcagaggaggagttcagcggcacaccgatgggtcgcccaggacaacccagtgaggttgccacatgtttcgttttccttgcgagccaggatagtagctttatctctgggcagagtctgcaccccaacgggggagtagttgtcaacggatgaacggtagatagaggctggcgtcaattaatatctgaatttcaatccggagcctcgaacgggcatgacatagttcgtattttggttgcgtgatgtcgtgaagggagatggatcaaaaaaagatattatttatagcatatttcgtttcgataagtaaactagtactagtccgttcagacaaatgatagccccaaaaattctatcatatagcgccgggcatacataagtggctacctcagattagctcaattttattggattctataactgcagtcttgtcgccttacttcacagagactgttggaatgataggcacatcagcacattcgacttgaacaacatgatgctcaaatctcccgtcagaagccccaattacaaccgcacttaattgatggccgtataaacacgccgagtccagtccaattgcatacctgcttagctgcaactggcgctttgcatcatgcccgaatatcaccatagtcttggatgctagcctatcttggcaccggttccattccataacccagctttcttctccgggaatttcagccggtacgaatacatcctcgtcacctgatttacggataaggctccgcatatgcattacagcgtgtggatcctggtcttcaagtgggatgccaggaacgaggccagcatgtacgacaattagaatgtcaccgaagcaggatgttaggacatgaggtagcttgacgcgcaatatcaatggcaaagtggcaagccagtcgagatgacgcgtcgaaagtaccgaggccgtactgtgcgatgtggcaggtacgcatttgtcggcgatctcacaatctcggatattatttccgggtagctccgcgtcgggattttcaggtacgaccggatcgtcagccacgcccctagagtgcagtagcgtatcccttgtggcgttgaccttgatctccgcagccgcaataagaactgcattttcgtggttgcctctcacggcgctagcgccaagcttcatggccagatcaacaacaccaggactatcggggcctttattgacgaggtcgccaactagtatcagatgatctcccttgtgtttgtcgaaatcgaccttgtctaagagtgcctcaagggacttttccatcccgtgcacatcgcctacaatgatcaaacgtccactgacagaaccattttcagatgatgggagaggttgcagaataaggttggtcggcaggtctgaaataaaggttgtgattgggaatatcttgtcggaagattttgtggccattattgtagacctgaagcataagaaagaagacagagacattaaggcccgtccacgggtctgtgtgttttatttacataataacccaatatagactagcgtagcttagtgtacatgtcaccaagatatatattcagaacaaattcatagagtcactggagtatgtcggcaacagaggaagtgtttccccacgaagcttggagggaaatgagtcagtttctcctgtgtgaaagaattttcacctccgtggatcacattaattacatgaacctcggtagaagacaagaatataatgaaagagaataagagaatatgttgttaggccataataatatactatggatagtaatgtatggatagaaatctcatgggagaaaaggttagaagaattcccgtcagatcatgagaatggaaatgggaagaggtctggtcctatgggtcccaatttggcgagatccagctacgaataagaagaagggagcttcagttggcaaacaaaagagtgtatggagttagatacatgcatagaagataataattattgcgatacactgagtagtcaaaaaaacaaaaaagacacctttgctcaaatgtaaatctgttcttcgatctagatcaagaacaaacattcacttcgaggaatttgcaaatctatcgaagatagatttagtttccctggggggcgggcttgccatctttgacatccttgggattcttgccatccttggggggaggggggacctggtcccgcttgccgctgtccttgatgtctttggggtgcttagcatccttgggaggagggggaacttggtcccgcttgccgctgtccttgatgtctttggggtgcttggcgtccttgggaggagggggaacttggtcccgcttgtcattgtcattgtcgccatgagccgggggcagagcaacttcagctgcagtaggctccgggagggggttgccctggacatcggtagggcctgaaaatagtgttaataaaactctcagcctaggaatgggttacatgtgccggtgtacatacgctcattggggggagcaccggcaacgaggccagcggccatcagagtagcgagaatagaggtgaccttcatattggcagttggagatttgttgtagaaagaaaggattgaaagtgtctttggtttggaagtgtttggaagtgtttggatgagagtgatgatgaatggaagacagtgtccaggaccgcctctttatacctttaaactcgagggaacccccttaatgttttgactgagctcaactttgtcacgacattggaggaaggaataacgatcggattgacgcgtcatggtcgtcaaggctggtctggaatatgattctattaaaaaagccaaaagcgaatactgcagtagcttggcctaggctgcaactacttctggttagacttggatcttgagatccgtagtttgtctctagagctttatgtggcctccttttatggggtccaaagaagggatataacagacctcaggctctggtattatacggtgtatacagagtgcatatagaattactctacgaggccatagtgaatatggaagcttttcataacagagaattgagatcatagaatgtctctgaatcaataatgttaatctcattactccgtactggtcgatgttctaagttgaggtttgagatcgaggatgatcaccatcgggtaagctccccgaagccctaagagaaagaatgaggcaactatggagcaacatggctgatccctagctaatgcgcctatttttaagaattttacatcatccatcttattcaagtttcattggacaatcgaagagctttctccagggctgagatgatgtgttccccacgtacacgcggcctccgcaaatcccagccacgcttcactcctcagtgctccatcgaacttgtcatttcacataccacattgaatttatggttcttcgtagctcaacgtatccgaaaaccatagctcttttaccctcagtttgaagctctgtatgagcaaatccatgagaaaggctacgttgcttgctgtattattcggaagcccctgagcctcatttccatagatggagacggtgagtatgttgacatggctgacagatgttgagatccaaatgcttccccacaggcccggctccattgaaatcgaattagggttgaccaaatttagaactgccgaatttccgaatttccgcttattacgcaatgatcgcccaaaatgatcgccatggctttttctccattgttcagaaccatctgcttccggttagccaatcaaggtccagagattcatggtggggcgggagatcgacgagcttatacgtacacagtttgacgcaattacctatgatgggacgaacgtatgggtaacgcaaaaggggcttgcttagttgactgtcggtgatttacttctgcttctcattcgctccccgtaaatgcttgttttctccaagcattgctgcctaatccatcaccactctagaagtcttgctgttggatgttaagccaaattttctgctaaatcaatgttttgcatgagcgcttctatgtaaaccacaaaaccaattccaaggggtgaacattaattccacaggtttcattgacccggaacgaaaattttgataccatcacgcatatgctcaaaattgcgcaggcaactcttcactctcccctttcaaattcccccttaccgcggtgaacctgggccctcctaaatgtagttctagaccacgtatggtatgcttgcactattggccctagaccttgggacattctcagtcaggaaaaagacttcatccttactccacttaactgaatcgaggctagcaccatgctcagtcctcacattttcgtacaaactaaaagcctacaagtacaaagtcgattttttcgttgttcgtagtgtcaaaatgagtatggctattgtgtcatcgcctatcccacgtcacatcagagtctagtctgacatttttggtagatgatctactaaacatggcacccacatgacccatacccatactcagaaatacacagctctttacatttctctcatgttgccaacatatctttactggatgatgctcctcgagtcttccaagaactgctctcggcaagtttggttatatgacgatctggaaggcgaccgcacctgccctacctgcacctgccttgtctgtatctcccagttatagaagtaaccgctcctttcatgaacgtaagcgaaagcaagcgggctaaattcgtcatttgcgtggtttgttgaaagctctcgcacaaaaccatgagatcaggaccgataaatagttttctccttcctttcctttcctttctatacttagtattccgcctgaataaagactttcttcttacaaagcctggtccgtgacaggttacgtttataaaacaaaactcctgtgaaggggcaaggtcatctgcatgtcgtatttcctgccactaataccaaggaggaagtggagaagcttacagagacgattcgtaagtaggcgcaagagctgcttgatatcgaataaacgtggtggtagaatacccactgctgtatggcaggtggaagctcagtaggccgtagcggaagtgaatggaaatcgcgtatgaacctaggaaaacatcacagcttttccaactatctaggaaagtcattatttggtgaagactacgctgctttttagataaatggaaaagaaggcgcaacctttaaattcattgctttggacatgattcccgttcaacgttgaagagataaaaaatatattgttcattcagtaacgaagacataatttctttctattattaagaaccttcactatattccagccgagagacttgtaaattgctctgtattcactcattccgtaaatcaaattctagagttgctatcggcatcgaagatggccactgcatttgcgggaatgaaaggaacatgcagcaagcatgcaacgtgactacaagggcttcaggtttcgagtcggttgtgcaggtcggtaattttataatatagagcgaatttataatattgcttgggaccatgggtttggtaccagcacctcggcacgtagttttgatcaacaacactcacagtttcttcccttcttctgaacattcacatcaataatctagcctgacacagttcaaatgcagtgagcattcccagctgcagcgtaccttttgtgtccacattggcaacaggctaatgaccccacgtaagtttgaaatctctctgtgtagaataagcttcagaagatatatatattccccgacccaccagcatgatcatcgagccccatttgtgacattgtgtagattccatcttgaaaggatctaagtcataaagctatttaaagacactgaatcgaaaaagaacataagataaccacacactctatggtactttttatctctgccttagcgtactttagttattgttggacatagtggtcacctgaccatcagcccggtgcggcaggcaccaacccccataactagatagtcgggcattctgcccctttaggccacattggcaacaggctaatgaccccacgtaagtttgaaatctctctgtgtagaataagcttcagaagatatatatattccccgacccaccagcatgatcatcgagccccatttgtgacattgtgtagattccatcttgaaaggatctaagtcataaagctatttaaagacactgaatcgaaaaagaacataagataaccacacactctatggtactttttatctctgccttagcgtactttagttattgttggacatagtggtcacctgaccatcagcccggtgcggcaggcaccaacccccataactagatagtcgggcattctgccctttaggaattgacaactctctccctctatcattttccatcactacactgtagtcgcatcagttatccatccatggctcacatgaccgcttagtcatcccgctctctgtcgatctcccgaatctctccaaagtccacttcccatccactcaaactcttttcctgtttggacccccatctggatgcttgcagggagataacgcagcagtgcataacgacaaggactatatcgcgccatttcttatcgcgtgaattggtggatgtaacaatgggagacacccctggagattgattacaaatccacctcattaccaatcacttcgaacagcccttgactatgtgtacatttgtagcctttttctctcaaagggagaacttcgagtatcagccttcgatttatccaaaagaataatacccgaagaatttcctcaccaatagaaaccacaccaccaaacacgaaagaatgctccgaccagtcatcttcaggagatgatctcaaagctccgtctcagtcccagtatctagcacaatctcaatcccaatctgaatgtgactgtacagagaaaatacatgcatcggatacgttgccaccaaccgaccccgaaacagggcaacggaaccggaagccaaaacctctgtcattctatcttgcatttatagctttgctattgatggtcttcttggtgtccctggatgccaccatgttggccgttgcaatcccggtaattcgataacaactccttcaattcaaacggccattgagttcacctaacccttcctctctataggccatcaccgatgaacttttcggcacgaccttgaccgcgttttgggccaacatctccttcacagtagcagtcgtggttatccagcccatctatatcagtttctcagatatctgcggtcgtaagatccctctttacgcggcttttgcccttttcggtattggatcgattgtcttgccgtcgcgaaaaacatggcagttctgattgtgggacgtgttctacaaggactgggcggaggcggactcgacgtccgaggtgaggtcattgtcgccgatatcactactctgcaagagagggctgtgtatattgggttactgtcgcttccaatggcgacagggtgcatcgcgggtcctattctcggtgcagtctttagtgagtttgttacgtggagatggatcggctggattaatctgcctatagtcggcattgccctcttcctggctattttctttatgcgcctaagaccaattgaccagtcccttcgctcccagcttgggcgtatcgactggcttggaatgccactatttacggccgattgtgttctgttcgccctaccactcagttgggctgggaatatgtacacctggggatcgtttcgaacgattgttccgcttatcattggtgttttgattttggtgggatttgcattttacgagggttatcagaccgacgctgtcttccgctaccgttccagaacggcacaaatgtctctgcttggaagcttcatccatggcttcgtgctttatactcttctgcaatatcttccactgtttttccaagcggtctacctcgaatcaccgttgaaatcttagatctcaatcttaccattctgctgtgtggtatttgtctttaccggaattgccgccttcgccgttgacttctttcggagatacatatgggagatttgggctggatgggttttcctcgccgttggctgtggtatcttctcactgtgggatcgatcttcttcagtagccatgactgctggcttccaggtgattgcggggatcggcattggcacaatcttcagcgtccctcccatcccaatgcaagccagcgctgcacccgatgaccagggtctcgcaatgggaataatggtcgcgttcaggctattcggtgctcttattggtcttgcagttgatgccactacattcagcagtgtcttcgccaacaggattagcggtatcgatttacctgcttctttggcattgttgaaagacccagtgaggccgtaagcttcattccctatttacgaacagccgatatctctcctgatctgcgggacctcattcgaggttcatataaggacgccatgcagacaatctggtatgaagtggccgcttttggagcattgggtttcttgagctctctattcgtggaggaattgactatggagacggaagagttgggtcggcagcatttcgagcatgagtcagaatgaattgaaatccacttttggaagattagatggtagagcgggtgaacctgaggtggatgtggaaacgggaattgccctgggaagtgtaaccaaaggggcatagcgcgttttatcaaattgtggccttaatgcctgaaattcggcctgagtttcgaccgcttttaggcatctatttacagccggcacggaataaccagtcccgatgaccccgtgaatataaagcttttggcggcatcctttttttcagggcatgaagcaatttaaattaattctagcaccacgaatgagagagataattcaatttcgaaaacggaaatttaatgcaagatggtggattatggctaattgactaaatacgacccgtacggagtacttaatgccagttatggtacggggtagattcatgtggaatggaactctcttcatattgccagatcaggtgatctttgaatagcttcatagagatcttaatatgcaacaccaacagtttgcccagtctttctattatacgaattgcaggaaccgtaatagtcaaaccaagttgacatatagctatgacttccttcgaaacgctcaggtccagtgtcatatccagggatcacaacaccaccattcaatctctattttcgaatcgctgacgagattaccctggggtgggaatgtcgcccctatcatctgccagacaatcgggttgcaaaggcctggaactttgcgttgaatgatctgaggtttccgtacgctaatgattgttttgtgatacttccaagctggctgcccgccgcgtctatctagcctcggctctgaaatagtgggttttaatgactcacaaaaggcatggttagttaggtcagaaatacacatactttcaagaataaaatcttctttgcctattcctatgattcccaggtcttttatgtcagaaatggaggtggtagcggcaaagaattgacccgagccaacttagaggtctagttagataggaaatataaaattcgcatgttttcattgcaataacactggcttcgatcgatggagtgcactatatattttctttcatatcttaaccctttgttctagtctagtatgctcatatctgcatcctccctgccttttttccaattggtgatgatgttctgagtagctacttatttcgcacgtttttcgactagttgaagatcccaagtcgctaccagtgcgtgcgtcgagcgatatctgggccacagcgcgataccatacttcgaggcaaatgatagcgggcaaaacatgcagattcaagtaacgcagcgtctatatgttaagtaaaagtgcccaagttccccacccatgcgtagaaaccggatatgtaccaccttttacgcagatgaagatattttgtattggacttattgacatagtgcataatgcatgacctgtactgtggagtactggaggttgacgacggtctacattgtctatgacgaagtagatccttataagtaagcagcttgatcgacaggatctgcagtttagtgcgctagtcttcagcccagccacgaattccacacactctatccagccgagacacaaggtctagtggcgatatatctactccgaagtagttcataccgcacggaacggaccggctcgagcgggagattcaaaaatatcttccatattgacgtgactgtgcatgacttgctgtatgacccatcatactttcattcgttgtttatgtaggtcgcagtttgtttcgggcaaaccgggatcatcagtgtggttacgactccattagaaggctgatcgattccttatccgtagggtccagaggcaaagcgacttacatgtatagtgtgggtcgctgctgatgaaagccattggcctgagaggagggaagcttcacccattagtgagaggggtattgttggaatcgccagttatgaaaaggaagagtggtataagtatctggttatcccccgacgagttgatggtctgacagacatctcgagaaaggaagaaggacacaaggaaaacaccaatatgaatgaaccacgcaaagaaaacaatccccacaatgtcatcagctcgtacttcatcggacctaaatccgaaaatatgggcaacttccgagccaacattacagcgatcctagatcaaatcgaaaagacacgttctgattaccaacccgatgatgatgtgtgttccaacaccccataatagcacaatgcagatgaaagacgggtatagaaactgacaataacaggtctttatcaccgaggatgttcgaacctctccggagttccaacaaatcacccaaaatttccatgaagcagtcaagaaagctgtctcactcttgggaaaacattccattccattttggcatcctcgctatgagggtcacatgtgtacggacatgactatgccggggctactgggttatttcatgacgatgatctacaatcccaacaatgtcaccgtggaggctagtccgttcacgaccgtcatcgagctccgggctggaaagcagctatgcgatatgtttggatacaataccgattctaaaaaattggaaatgccgctgtcctggggccatatcacttgcgatggaacagtggctaatttggaatcgatctgggttggtaagcatacctactcactgtgatgccaaagactcggggattgaccaatgtacagctcggaatctgaagttctaccccctcacactctaccaagccatgaaggaaggtagccttggcttcattgctgatagcttctacgtcaccacttgtgtgggagaggagaagcttttcagggatctagggaactgggaacttttgaatcttcgatcggaggtcatcttgagtatgggagatgctctgtatcggcaatatggtatcacgtccaagttcctagagaatgccttgacacctttcagcattcaaaccacagggaaggatgttttggagcgcgaattcaacattaccaagcccaccaagtacttcctggcccagacgagacactactcgtggcctaaaggcggaggtaattcttaacttttctgccctagagtgaccgattactgataaatccctagcgatcgccggaattggttcggccaatatgcagggtgtggagctagacatggacgggcatatctccatcgaagcgctggagcgagagctcgatcgatgtgtgaccgagcgtcaagccgtatacgccgtagtggccatcatcggatccacggaagaaggtgaagtggatccgttgtatgacattttggcaatgagacgtcgatttcaagacaaggggctgtcattcctggtgcacgccgatgcagcctggggcggatactttgccagcatgattccacgattttatatggccccgggaagagcaacgaagaggaaggatggagacaacgccgtcatcaacgttccttcgttgaccctgaaacccgataccgtcaagcatatgattgcactcaaagaggcagactctatcacggttgatccacacaaggcgggttatatcccctaccctgcgggcagtctctgctatcgggacggtcgcatgcgattcttggttacctggactagtccatacctcactcagggatcaatggaaaacatcggcgtatatggtgttgagggaagtaagcccggtgctgctgcgatggctgcatggctctcaaatcagactatcggattggatccaagaggatacgggatgctgttgggcgaagcagcctttaccagtgcacgggtaggattcccctttctgtctgtattacgatccgctttctaacccctgatagctatcggccttctacgcagctatgcacctaaagcaacccaaggaagatggcaaatcctactatgtcatcgttccattcaaccgactgccgatcgagaaagagggatacgacatcctgtcagaagaagcagaccaccaacgtgaacttatttgggaacatgttctgacgaaagataacgccaaagtcagcagcaaccccagtgcgatgaaatggcttcgggaaatcggctcagatctgaacatcaacgcattcgccctaaactggtaccatgccgatgggaccatcaacaccgaccttgaggaagcgaattacctgatgagacgagtagtcaaccgactatcgatcacaaggagtgacaaagaccccagtaaaatccccctcttcttgacctccacgcaattcgagcccgcattatatggcaaatgtgcgcagaacttcatgaaacgactacacctcgagccctgtgcacaagatctctgggttctgcgcaacgttgtaatgagtccgtttccgacagaacgtggcttcattcatcagctgatggagaaactggaggagaccattattgatgaagtcaagaactcatgccgcccgcgaaatagtcctacggcaaatactatcgagttcctattacgaggaacggatgaagtgttcctggagttccagacaaaattccatcgcgcaacccagcgtcaacagatcatcttggcggtggaactacggaaagatgtcaaaagtcaatacatcgcactgcgagaaaaattcccctgtgaagacatcggattcgcgtcgcatggtccgattcatctcgaaagcttaatgcttcaaatcaaggacgcgacccactctcgtccacaaatcgagggtgagatcggcctcgttgaagcaggatactactcacacacgatccgatgcaacgtgacgatgaaccgagtggtgaagagtcggggattgaactccaatttccgagacaatcattacccccgtaacttcatgccattctatctcttcggcacgaaagaacaacaccatatcacgcacatgctcctccaagcgccgaacatcaatctttcatctagtaacatccagctggacaaggagctccatgacaaagtagcgcctcgcctcggagagggagaaggtctcatcctagcgttgaccgattaccgcgaggaaacgatgcacccattcccgcttgataacaatgaccgcgcgatcaatagcaagggattcttcttccgaagaggtcaaaccttcaacgtaaaggtgtatgttgaccccaagctggctacagccaatggacctgggttactggatgaattgtgcacgctggtcggccgtggtaaaatgacactcggggatgatgtgcatgtggacgtgactgtgttgaatgctgatccgtttgaggatgaggagccggatattcagtgggaagaggaattggaccatatcaccaacgtgttgaatagtggccagtagagcgatagattcctgggatgccggaggaattacaattgccaccgtgccatagagtggtcatccacgtctaaatataatatctcttggcgccaaaagcttcatgttcatggggtcgtcgggcccggttattccgtcccggaataatttacgtaaagcgatgctcccagttagttcaggccaactatcaggcattaaggcctcaatcaggcgaaaatgcgcgctattcagcaatgctaattgttactgagcctgtgccagaaacaaaatctacttgcaggccttataaatgtggcgagagctgagccctgtcatgccagaatactcatcgaaaacattagaaattcacgtaaattcatcgatcctcaatctaacctggtatatcccaaatgtaagtctatatccacgggcctgggaaaacctttctatatacaaaacccaaacacctaagccttgagagtatacacaacacgaccacgtgagtctgtacccttgagcacaatctcatcgccagtgctggagacaacacggcgctgatccccattatgtagaacaatatctaaatccttccaagcaggagtaaagccagcctcgtcacgctcaaacttaacaagtaccttctcctcggttgagctgtaggtaatcgtgtatgcagcagtgccgggttggacggagataccatcatcttcataccaagtggtagcaaagacagtaccgtgcgaagttcccttgggcgggaacacttccacaccacggtaatcgtcgacatcttggacggccactgatgcagcggtctcatcaccaggaacacgggtgtgcacgctcttgccgacagggatggcaccgccgacacgggcaatgaggggaatgctcttctgccattccgacgagatcttggcccactgtccagatgcgaggtactggtacggagcgttcatgttgacgtagccatagtcaaagacgctgccggactttcggggcaggtagacgttcgcgacatcgataccggctttgtagacgccaccaacgagcacggtctcaccgaaccagaactgttcctcgcctgacttgagtgcttttgtccacacctcgggatcagactcgtaaccccaaccggtccagcgctgtggcggtgttgcgaatttgtggctctccagaccgagagagtagatgtagggcagcatttcgtaacgacgcttgatggtggcgcggacctgaggtgtgatctcagggtacataaagggctcgatgacatcgccgacgtcagagtccttgggagaagtcttgaagcagttgattgcgaagcggggagcgtggcagcctatttgaatccagcggaggaggagctccggggagggctgggggccttcgaatccaccaatgtcgtgtccttcgcattggagaagggacatgccggcgtttagagacagggcgttggcacccttcatgttttcccagcttgtaacgttgtcgccgctccaggaggatgcggcgtaacggagggttgatttttattatacgatctaagacaaggcgcacctttggcaagtggatcgggctaccttgttcgatgcagtgcagtcctcgttaagggaagccctatctgccagcaacgtgtacaacaacgaatacggacttttaagagatcagtataagcatttttatttcttagagattggagttagaaggataaggccgttttgggaagcatgctgaaaatctgctccgatggagatttgaggcgcacggaaaccaagctctgactctaattgtggctcgtattttggcccccaacctactattcgggtgtggatctagcgcagctcgcactagactccacaatacgcccagcatcaccaggcctcggtcttgagttggcctgtcaatcctgggatggcctgtgctttcagtggttagaattggggtttgcaattgagcaaggtgcatagccaccgtcgctccgaaagttcgctatcttgagggtagatcccaaggaaagaaattgagagcttgaggcataatggaaaaagccaggaacgattgtttcggtctcgcctgaaaaagatctcggtcctcttgtatacctctccgctatcttgcagtcgattgaatactagttaccacataacttgcccgaaggtggagagcaatttccacattatccctatcgaggaaaccgccaactagctgttcgtggaatcacggaaatctggccgctggattagtgtatcacaagatacttgtctcagtctgaactgattttttgcctattgccacttttcgagtgaagagccaaaataacgtagaacataatcgcaaatgcaacagatgaagcgaagttgatatcttacagctgcgtatttcgtataacttcatatctaaatccaatccttcacattcctggccctaacgtaggagtacttattatttcgctggctaaatcctcggaggcttatgctccaattccgggagaggagacttcgatatcaatttattttagtggatatatgctactttcttagcggcattagtttgtcgcttacgctctaccaagaggagaagtcgtggatataaaaggcgttcaagatcctcccaaagctgatgaaaacgtccttcaaaattagagaccctttcctttgagacaagcatatcacttctccctcggcgaatccttcgtccttgttttagtgtacttttcttcatcatgaagcttccaattcccattgctttcgctaccctcttggcctttgcccaagctgctccatcgggccccggagaatctcgcttggaagcacgagcttctgtcaacgactgcggagactcgaccttcataaatcaaagcagtggtggttctccacttgtggctgactgccagcatcttgctaggaatattgctggcggcggcacctggagagtcactgccaccggcggccagcaccagctagctcagtatggcacctgcgcttttggtatccaaggccacaaagacatggatactgcacacgttggcaatcaggacattatcgacctcatcaactcttccatcgccaagttcaactggaacggaaaagtcggtgcgaagggcgatatgttatgtcagggcgagaaggggctcatgggtaagcccaagatgacgtggggtatctatcatacttgagctatagcagtgcgatcgatggcaggtttatttgtaagttgctctgggatctcatgtgtcctatatacggagaattgggcgctaatcacatcttgaaggcatttcatgatcgagacaagcatattattgtgtcacatgcattttcaggccatgccatgctcagttcagtgtacttaaatagtggaaatatcggagggactgtctgattcaatctatcttacgtatattcgaaactgcgccttaccgtagaaatgtggttattacagatcttagacacttgttgcatgttgactgaaatgcggcatagttttatcacgtgtatccaatcttgtcttatttggctgttcatgatattgagtgtggcacaaaaaacataccgctccggaaagctcgtttcggtaatacacccctaacataatcgcgccggctataacgccctttttaccacagtcgcaagaagttgctcgctaaagtcgcccagctcgaaaggttgagagaacaccacccaatcagcacctacttcgaggtgccattaccagccctcgtcgccctcaaaaaagccatgttcaagcttgaaaacatttggaccctatcccacaaagggtgaggtgaatgaaacgtttgaaatcgcgacagctccccgtatttagataaaagattgttagagtagtctatagatacttttccacttagactaaatatcatatctagctattttagggggtttggagaactttgctaatttgatgactgattagggcgatgtaattcccagtaccacaataacgcaagttttcgatttcttcgaaataggtatagtatactaaaaattcttatcgatacctctctgacaataatggattagatcaagttgtggtggttgacgtacaacgctatattctatcgcatttacgatgtgtttcgcagatgtcggtcgcctggagtgggtggcttggcttggctgtcttgggtggcgctgcgggtcaggacgaagggacgcagcttgggctccatgtcctgcagggcatcgtgggaagatttgcccatcaactcggtatggagggcacgaccccaaagaccgacggagttcttgacgtctttcgctgcggcatcggcgacagtgggctcattgagggacatggtccaatcatcgtcgggtagggtgtattcgttgttgtcgttccacataccatcaatgccaaccttttggagactctggacaccgtcgtaccaccacttgaaggcctccgctgaggtgaagtctatgtgggcaccatcgccaccggtggcaccgccagcactccacagacgcatgtatccaggctggttttcggcatccttaaagaagccaccggcatcaacaagcttctggaagtcggggtgagaagccaacaggaaaggcttaatgttggtgagaagtcggataccgtactggtgcattttggcaatccagtcctggggatccgggaagcgttctcggttccatgtaaagacattgcgaaccttgggctcggtctcagcaatggaatagcccgaactcatctggtgagccgagcagggaattccatgttgcttaagcttctccgcaaactccagaagggccaaatgagccttctgcggctcatctagcatggtgtacttgtagccaccggagatatagccgtaggcccagcgggggaccagaatggggaagccaaccaactcggcatacgagcggacaacatccttgatggtcttgccaacaatgtagtattgctcaataccgccatggtcctggcggtacaccttgaagtgtccccagagcccatcgatctcggctcccacagaccacagaccgcggctatgggtggtcgagaagatggccacacatccctctgcagaagccttgatcagaagcgggatgtgcttgtagaggggatccgtattgtatacatcatatccaaaagagtcggtggccgatagttggaattgacgaccagtcaaatccatgggagctgccttctcgccgagtccgacatggaggcattcgcggtcatgaactgaatagttggcgacaccctcgccgtctacaatgtatgatcgcagcggcaaatccttgtgcagaggcttttcggagccggtccatgacagtttgaccacaggggtgtattcccagtctatggaagcagtgacaccggcgacatcgattgttttggaggagggaccctccttggtgaagacattggcgccctggaggttgatctcgggcttggtgacactcggatagggaggaatagggtgctctgtggaggcgaaagtggctcggaatagattgggacgaatagcttcaaaagtgaaatcaaaagcactcttgctctttgtgctgcttcggaggtggacggaagcttcttgatcagtggcttgtggcacttgcgaatagcccttggggcagacttctctttgaggcatgatgaatgtgaaagacaatgcaattgattcggaggaactggagagaataccaggatatgccctgacatagtggtgtatttgaatgctagtcgagctcccctcagtcccatcgtttcatgtaccccacggtggtacgaatgatgcattgtagctgtgtagaatcggaatccggagataatccccgagaagcggagacgcgacggttgagtgggaaaggaagggcaggttccgggattaattttgccgcaaacctccgcatttcccccacaaagaacgtccggggaggccccacattagtttttctctcggctttgcgcaccgaaacccgatattaacgattttcggcacttctcatgactcctcttcctccatcgcccctcccatagaatttgcctcagggaagtgattggataatacatcccgacgtcggccgcgtgtatcgtgtcttgccgtttctctccaggtcaactgaccgcgtggactatacaaatttttatcgccaactatgccaagggctaaaaaggaagaaaactatgttgtacgtggtgtgacacttcgggtttggctctcttctccggggaatgtaatatagttccttccccacggggttgtgcatacaggctgtactacatatatctcaggtttacgtattttgtcttcccctattcagcttgattcattgtctttttatacctacttggtcttttattatttcccaccgtgtctctgcgagtgattagctatgtcgcaggagtcaacttcacaggcaaagaaccagcgggaggagttcgtggagaccattgaccccgagctgtcacaagctgtgcctcctcaaaataatggcacaggaagtcagcccaaaggagatcatgctttgcaacttattgaagaggcagggcactcaaccatcctaacccctgagaacaacgccaaagttcttcgaaagatcgatttgcgtgtgcttcccattctccttggaatctacttccttcagcaactcgataagtcaaccatctcgtacgcctcggtgttcggaatcgttgagaaagcccatctccatggccagcaatactcttggctggggggttcaatctatctggcgcagctggtgttccaacccctggttgcctatgttctggttaaagtgcccctaggaaagtttctggccgtgtcctgcctgctatggggcattgctttaacatgcatgactgcagctacaacttttggagagctgcttgcttgccgaatcttccttggtatctttgaagctggaattggttcgttgtctcctgataatacctagccatccctactaacgatgagctttatcagcacccgcgtttattgcagtcactcaaatgtggtaccggcgtcgtgagcagcctgtgaggttgagttcgtggtatgcgatgaacggaatcgtgaatatggtgagttccctcccatattgtcctcgtgacacttatattaacgctgaaggaaagtttggaagcttgattgcctttggactaggtcacatcaattcctctatatttgcgccttaccaggtgagctataatacataattgcctgtcgaggtattaacatctaacaccgactagatcatcttcctctttttcggcctagttacggttgggttctctgctgttgtcctgtaagttttgaccatgttccccttttcgccgtattatactaagataatcttgcttagtgttttcatgcccgattcccccgtgtccgccaagttcctcggagaggaggacaaacttctatctattgaaagacaacgaatgaatcaacagggtgttgagagccaagagtggaaatgggaccacgcaaaagaagcaatcctcgatcccaagtcatggttctggtttgcgttaatgttctctatttcgtgagtgagctcaaatcgtacaaatcactgcactaagattgctaaccactcatcagtgttccaagtggcggcatcactactttcgggcccttgattatcaaatcctttggcctcagccaatatgatactatgcttttcaacattcccttcggtgcagtgcagcttgtcgccacaatgggaggagcttggctagcaaccatttggaaaatgaagagtccagtcttggcattgctctgtctcccacccatcgcgggttgtgtgatgctattacagattacgcacgacaatgcccacaaagggcctttacttgcaggatactatattgtaagtgttgaattgaaacgaaacatcactgtggaatgaagctaatcgatttcatctagatctctgtgtacccagccatcagtaagcgtttacctcattccgggatttaagcccagctaaccatctctagcacctttaatatactcttggtctgcaggaaacacagcaggagaaacaaaaaaaaaggttacaaccgctatcctgtatgtcgggcagtgcgctggtaatgtatgtaacactgtaagccgtcacatcgggttttcgtgctgacatatgtcttacctaggtccttggaccgaacctatataccacaaatgaagcaccgctttatcgtcgtggtctgctttctaagtaagtttatcaacgcacaagtttttgtgcgtcaaatatctaacgcacgcccagtctcgcgatgttttgtgtcttgataggtctcaccgggtaggttttaaccaacttcgagtgatcattctttctaattacgaattattagggcaaataccacatatctgtacttcctgaacaagcagcatgagaagagacgtgtgtctctcggcaaggacgctaagattgtagaccagtcgatgcaagccattcaagctgtctccgacgatgccaaggaggatttgcctcaacaagcagcaaatgacaatgcctggaaagatctcactgacttgcaaaatgaggactttgtctatgtcttctaaggtggcaagtttaattagtctgtgttatagtgggaacatctgatttcgcattatttgatatagcacctttgtattgattaaatgtaaattggaatataatatgtttataattacagtcaaaagcaagaaccaccaaagtctccttaaattagagcttttcctttgctgaactatttcgttgtgggacctggttgattgtatagccggctcggagaaaaacccgaaccccgcgtttctccaggttttccccttcccgtcaaccccgacaatcatcagtgcgagcagaagacggctggctctacatggctgatcagtctgaatgtagcccgtacagtacggtgatagaggatgaatccttgcaccttattccagcgccaacggggaaaaaacgcattccggtacgtcgctattcggattaggaccccacaacagcggacgaagcctaacaatgcatggcgtttttggtgcatagaaagcctgcagtgcttgtcgacaatcgaaggtcagtgcccaggcctcccgagcctgcatattgtggggttttgactgatcctttcaaggtaaaatgcgacggagagagaccatgtacaaggtggttatattccagatttacatgaagcttaaagcttatcctgataaatcagatgtcaaaaattagaaaagcaatgcgtgttcttcgaaataccgaaagaccccgtctcagagtacgaagtgtcctaaggtgttatcaaccaagactaacatcatccaggcggatcgaaggcgtcgagtccgaagttcaatatctccgaaaacagctagaccagatgcgcgagttgtttcaacagagccgttcacagcccaccccaaagtcccaactaacacactccccaagccacctctgtgataggcaacaggatgtgcctcgcgagagcgcttgtggctctcgttttcctcattcacaggatcaccccgaaggtttattcccacatatacctgtcactggctccgctaggtatacaaattgccaccaataccaaaggtctatgtcggggaccatacaaacgctctctccaaatgagacatcgactcagcctccctacgcgcgcagtcagataattactagaccacccaaaagaaaacggtctgggtttgagattcgagatgagcctattgcggactttattgataaaggcctcatcacgcttgaatgtgctgtttcatacttcaatacgtatgtatgatccgggagttattcggggattaattatgttttactgacttgagagatttcagcttctttgcaggatgtgtatgtatcaacccttattgccatactttaaatcctcatgtttcgtgaattatacaggacaggtatatcccgatcttcgaccctcaatacgacacctttgactcggtccgatctcgaagtagtatccttctcaacgcaatttgtaccattggctgcatggtcgaaactagtgaatgcccacccctggtatattttgtacagtactattgtactaaacagtttcttccaggatctggaggtggttcaatgtccgacgttctccacgccgaactcaagaaatggatcaacgtcataatccagaacaaacaattaaactgccgagaatcaattcaagcaatgctcgtagttgcttgttattccgcagaacgctcactaatcttatcctttgccactcgcatggccctggatctggaattggatgaggcctttgatgaattaacccggcggcttgctcttcagaacgaagatatggcttacgccttgccacatcaaatgtttgaagaggagagagcccttatgtggaatgctcggacgtggttcgggcttttggttctcgagcatatgtaagatgagcttggcttatttttatgggttactaggctaatcatatgcaatgtagattccgacttgacggaggaaaaccacctggcattcggctaaaggggaactcccgccgctgtcgggttttacttagccatccatggtcgactattttggatttacgtttgttctctcaggttgaggtatgtggggtatctaaaacagacttgaagaagtattaatctttcttagttaaatattctcagaggtatgacctttcggtggatttagatgcaatgactaatttaccttctatagccaatgtcggtgatgccctaggaggaaacacatcgctcgatgggcaaagcatcgcggattacgtgcatgatatgaaaatcgagctagatttgtggttcgagtaagttttccagttttaccgtatcctaaaaaacccgctaaccccgggcagtgactggttacgcattatcggtataaaatcagatgaaataatgcgctgaaactttctaacaattcgaagaaggttgtgtcgccgccgccgaagagaagccgtcgctactagtcgcccttcgggtacagaaatgctggaccgaaatgatgcttaactgcaaagcattacgatccatgggtgttgagaacgtagcgtgagtactactctagaagaacatatgcctccatctgttttaacacaaacgtgaagtgccatgtccaccacggaaagaacaatcctcctcacagccaaagcaagtgcacgccgccatcttcgcctcataattgccgatccagacttctacctcgccaaactgaaatatgcaatggattttgtctgggccaagtgcgcgttctccttcctattgcttctcaaattatcccgtctgatccctgagcgcgacgaggagcaccaagagctgctggaacaaggtaaccgactcgtcgatgagctgagtaaagctggagctagtggaactcagtccggtgctgggaatatttatcttcaaatcttgaaggtcagtattgagaagtacgggcgtgcattgatggaggcccagcaacccagctcagatgggcccacggatacgtcgccgttctgggagttgtttgatgcccaagcggatctccaatggtttgtccctgagcagtttgtctccgagtgggactttccggggctcaatttgttctatttccctactgcttggcaggattcccttggggacttttcgttggctatgtaattctataaattaaatcttaacctcacgactgctcaacgtcggatatagttacagaattctatcaatcttgaactatctactgttgctgtagtccttggtattatatatacatgggtttggaagacatattttcatcaaaacaaaagaaaagatctattaccgttccacagaaacagtatactcgacatccttccgaataatcatcctcgtactcacatcgctgccactacgctcactgcccctgtcctcctcggacctcccctccccagaatgcgacggccctgaagcctcacaaacgaccgtcctattctccgttccatcgcccaagtgcggcctctccttgaacaaaccactcacctgacgggagggtcttccctttacattgcccatctcgtaatcccgcgaccgcccagaagcgtaggggtctgtatttacacgtctcctagacccagaaccgtatccatagccgccgctgctactaccaaggtttgagtcgccggccgtgccgtagtgggtactaagggcattcatgaaggggcgcagacagaataccgtgcatgctatcagggcgtagttgaggtggagctgggtgaagactgtgtggctgattgcggtgaaggtggggtttttcacgattgtgtattccttcagtttggcgagatggatggcggagaatactattaatctatcgtttgaattttgttagttccatatattagattgtgggaagtggaagagggacgtacggtagcctcgccgcgaaggacaccataatcacgattttatgtgtgatttgcatctgcagaccccagattagggcgatacagaaggcaaaaagtaatagttcggtcaaaatgtcgagcgcggtgattgcttgccagcgggggaacttgtcatcgttagtatatccgattctacgtctgtatattccgttcgcggtggtttttcaagtagacataccaggttatggcattgctcgccaggtataacccacggcttgtttccctcgcagttcactgcgataagcagtatcgacactataatccccactgtgctaagcccgaacgtcgcccagagaatactcttgtggtgcttgcggggcgtcaggcgcaagtagatggcaatgatgcagcatttggagaggtacagggttatgaggtagaggatgtcggcggcgaggagggactatgctgttagtgtatacaattgaatgggacattgggtaatgcgaacattttgtatgcgatcaacggccttctcggtgagtagcaatatgtccgtcccaaagccgatgctcgcggcgtggaagatgactattgactcgataattgcggatatctattcccgttagccccatttacggaatatgccagtttctttccatgcgtacggtcgctcccaaaaggatgatatcgtctgatccccacggtggactgaggaatgtccgcacatacacccggatcagcagacagaccagcgaaatcactaggcatatggcagcggtaatgataataataccggcatgatgcctgtcgtctattgtctcgaaaggcggtgactggccggggggcactttaatggccattgtggcacgtctttgggcttggaagtttcagcgaggatatcgtctgaaaagaaatacgaaaggacgataaccagcgaccatgatgctgactccgtcgatggtggccacacagctcaggcaacttaagtggagggacctagcaaggatagtaaccttggggctagtagctcgggtaggctcaaaccacttgagctcaagactcggcatcctaacatcattaaggaactagaattctagaaaaccctaatcatgataggggcccaggacggagtagtgtagaggtgatacaaaccattgttttcccgatcaagttagtcgatcttttcgagtctcgagctggaacccgatcgaacgtaacatagattaagtttgattgggttaatttaccagccagccgaagtgtgtagatagtgtcgtatgggggccgaaagccttccacttaagatatctcgaccgagcgggcgctccgccacgttagcaactaataaattaaaataattcgtcatctccaaccggacgggctcggagacttcgtacatactgggaacaaagttcggcgatatggggctgaatgggggccgaaaccttggaacccttccgcttagagtgcccccacctccacctgaatatggaataaattaaaaaacgcatcgagcttatgctcacgacctttttagaacactcacgacgaagtataacatacgttgtaacccaaaggatcaggccatagaaatgcgcgtcccaagcacccaattttccagaatattctctaatcactaaacctaggattccttcgattcctcgtcaattggactccgtacagccctctgaattcgctagtccatatattctagctagacactacgtaggcagttggtgactatctattaagctgatactgagggccgtgctgttaaaatatatcattggcttgagtctgtaaaaaaagtggaaaaaagtggaaaaaagtggaaaaaagtggaaaaaggtcctggttggatcgtgctactatcttgcacgcttgtttcatatccacgaggcacgaggctgccaagtccttccttttccttctctttatcaagtaccacaagaatacataactagtcccgaggtcggccgcgtttgcggctgctgtcgctaagaacggcctgatctagctagctccgtagtagtcttcagtagtctttttagtagtcttttagtacaacatagtctcttttcttgatttagttttctaatagatggcgggaaaagacggcataatttgtgaaactaacttttctacgaagtctgaataacctttgacccagtctctattaaccctggattaactttctctcctaaaatatatccagagtttgggatgtcgtgttgcccaaccactgatacggctgctctcatatctacgccgttgcatcgaagaatccgctttatcatctgagaatgtagctattgttgtatctctagttattaccctatctaatcacttttcctccctctaatgcaacagttattcaggttggtagcgcctacatctctcgcttcaccagcgccacgggcgggatatagtggtgccgtccccgcaacacataataaaccaccgcgacgataagaatcccaccgtacatcactgcgcaccagttcatggtttctggctccaccgtggaagtgagcgggaagaatgcgaacacgaaaaccgggcagaggaagcacaacgccccgatattaattgccatgccgaaccggccaagcgtccatttgtgcggtgggagaggctctcctctgatacgcttgaggagcacgcatgcaattgttatgatatatgaggacatcattgcgccaatggtcagggtcacaatggcgagtagtgcggttgtggagccgatattgatgagtgacaagaggactgtcactactagcgagaccatcacggaattcaaggggatattccaaccggggtttacctggcgctgttagtattttcaaagctgtagaaagagaataaaccatacatagccgaagaaatcggagaaaggaaggccgcgatcacgcgcgaaagaccacaactggcgcgatgccgttgcgacctctgtaattgtgctcgccgttagagtcagcactagaatagcggtcatggtgttcgttcccggcagactctctgtcgcgttatagaacacctgcatgaacggatatcctgttgggctggccaggatgtcgtcaatgtcccctagtgtgaagcagacagtcaccagcatcaggaagccggaggcggcgttgacgcagacagaggtgatcatcgcctttggcagggtttcagacgcatctttgatctcctccgctgtacaatattagcgaagttcgtcaattcgagagatagacttacacatgtgcactgcacaatcatatccaatcagcgcggtgattgtagtcgagaatccaacgagcgtggcagttcccgcgctgttccaatctccgccgttgttgaattcggtaaacacctccttcgcgctgcggcgagggccaaggacccacagcggaattatgatcgcgaacaggccgcacacatgcagaatcagaatcaatacctccacgaatggcagccgcttggccaggaatgtgttgaatatgatcgaaaacaaggtgatggcgataaccagcagggtgccgtgccaccgctggccttcataatccggatgattcagcactatcaggccttggatgatagttccagccaaatacgcgatcgctacaatggcgcattgccagcctgtagcacatagccagcctacataattagtttagttgagcggaagggatgtaggagaacttaccggtgatgtagctgaggaatttctggcagctaggaggggcaaactccgatacccaatggtattgtccgccggaggtgggcgccctggggggtcagaataattacgagacaagatctcaacgggtagactcacatggatgccatctcggccagactcaggaacaccagaaggaacccagtagcgacgatgaggtacccccagatcagaccggcagttcctccatcggtcagtccttgcgcaagcagcctatacagtcagtcattggtacaattagtaagtgtggatggcatacgtcaaaacaacctcccacgtggcgatcagcgtgcagccaaatcctacaatggagatgtatcggaagttacgctatagggtcagcgaagatgcatcaaccaggataataggaaacgtactcgcaagacttgctctttccctagagcgctcatatcggcctggtcagcctgggtgccgcgccatttgggggcgacatggcctctggacggggcttcgtcggccagagccatggtgactgttgaggtgtctttgtcccagggcatattgacatgtacacagcagagacaatgaagggtcaatacaaaggacaggggtatggtagatcacgtcggtactttgtatgaaagcaaggtgtcaagcattagaatattc
